(19) United States
(12) Patent Application Publication
(10) Pub. No.: US 2014/0046039 A1
(43) Pub. Date: Feb. 13, 2014

(54) ANTIBODIES DIRECTED AGAINST INFLUENZA

(71) Applicants: Rafi Ahmed, Atlanta, GA (US); Jens Wrammert, Decatur, GA (US); Patrick C. Wilson, Chicago, IL (US)

(72) Inventors: Rafi Ahmed, Atlanta, GA (US); Jens Wrammert, Decatur, GA (US); Patrick C. Wilson, Chicago, IL (US)

(73) Assignees: THE UNIVERSITY OF CHICAGO, Chicago, IL (US); EMORY UNIVERSITY, Atlanta, GA (US)

(21) Appl. No.: 13/978,607

(22) PCT Filed: Jan. 10, 2012
(86) PCT No.: PCT/US12/20824

§ 371 Date: Jul. 8, 2013

Related U.S. Application Data
(60) Provisional application No. 61/431,406, filed on Jan. 10, 2011.

(51) Int. Cl. C07K 16/10

(52) U.S. Cl. CPC C07K 16/1018
USPC 530/389.4

(57) ABSTRACT

Antibodies or antibody fragments, wherein the antibody or the fragment binds HA domain of influenza virus (e.g. H1N1, H5N1, or both). Also described are cloned human antibodies that bind influenza

### CROSS REFERENCE TO RELATED APPLICATIONS

[0001] This application is a 371 USC filing of International Application No. PCT/US 2012/020824 filed Jan. 10, 2012, which claims the benefit of priority to U.S. Provisional Application No. 61/431,406, which applications are hereby incorporated by this reference in their entireties.

### GOVERNMENT SUPPORT

[0002] This invention was made with government support under Grants U19-AI057266, U19 AI057266-06S2, RR025008, HHSN266200700006C and NIH/NIAID 5U19AI062629-05 awarded by the National Institutes of Health. The Government has certain rights in the invention

### BACKGROUND

[0003] Influenza is the seventh leading cause of death in the United States (Beigel, 2008). The elderly, the very young, pregnant women and otherwise immune-compromised populations account for over 90% of influenza-related deaths. The pandemic H1N1 influenza virus strain is immunologically distinct from other influenza viruses, leaving large population groups susceptible to infection (Brockwell-Staats et al., 2009; Dawood et al., 2009; Garten et al., 2009; Hancock et al., 2009). The CDC reports that the 2009 H1N1 pandemic strain caused an estimated 60 million cases and 256,000 hospitalizations. An unusually high frequency of severe disease occurred in younger and otherwise healthy patients (Hancock et al., 2009). In addition, rare infections with avian H5N1 influenza strains in humans had close to a 50% mortality rate (Subbarao and Joseph, 2007). Emergence of a zoonotic or antigenically distinct strain that combined even a fraction of the morbidity and mortality of the pandemic H1N1 and H5N1 viruses would have dire consequences. Antibodies play a key role in protection against influenza infection in vivo (Gerhard et al., 1997; Luke et al., 2006; Puck et al., 1980; Simmons et al., 2007). The fact that there was little or no pre-existing antibody titers present prior to the emergence of this pandemic virus, and that the virus atypically caused such severe disease in young adults illustrates the importance of comprehensively understanding the B cell responses and antibody specificities induced by infection with this influenza virus.

### SUMMARY OF THE INVENTION

[0004] Described herein are antibodies, antibody fragments and peptides wherein the antibody or the antibody fragment or the peptide binds to an HA domain of influenza (e.g., H1N1, H5N1 or both) virus and comprises: (a) a VH CDR1 comprising or consisting of an amino acid sequence identical to or having 1, 2, or 3 amino acid residue substitutions or deletions relative to a VH CDR1 in column J of Table 2; (b) a VH CDR2 comprising or consisting of an amino acid sequence identical to or having 1, 2, or 3 amino acid residue substitutions or deletions relative to a VH CDR2 in column L of Table 2; (c) a VH CDR3 comprising or consisting of an amino acid sequence identical to or having 1, 2, or 3 amino acid residue substitutions or deletions relative to a VH CDR3 in column N of Table 2; (d) a VL CDR1 comprising or consisting of an amino acid sequence identical to or having 1, 2, or 3 amino acid residue substitutions or deletions relative to a VL CDR1 in column J of Table 2; (e) a VL CDR2 comprising or consisting of an amino acid sequence identical to or having 1, 2, or 3 amino acid residue substitutions or deletions relative to a VL CDR2 in column L of Table 2; and (f) a VL CDR3 comprising or consisting of an amino acid sequence identical to or having 1, 2, or 3 amino acid residue substitutions or deletions relative to a VL CDR3 in column N of Table 2.

[0005] In some cases the antibody, antibody fragment or peptide binds to the HA domain of H1N1 influenza. In some cases it binds the HA of H5N1 influenza. In some cases it binds the HA of both H1N1 and H5N1. Thus, the antibody, antibody fragment or peptide binds to the HA domain of two or more different subclasses of influenza A. The antibody, antibody fragment or peptide can cross-react with two different influenza strains (e.g., two or more different strains of H1NI such as the 2009 pandemic strain or the 1918 pandemic strain). In some cases, the antibody, antibody fragment or peptide may cross-react with three or more, five or more or ten or more different influenza strains. Thus, the antibody, antibody fragment or peptide binds to the HA domain (and in some cases can neutralize) two or more of the following H1NI strains: A/Brisb/59/07, A/BrMis/1/1918, A/Indo/5/05, A/NewCal/20/99 and a/SolIs/3/06. Some antibodies, antibody fragments and peptides immunospecifically bind to a particular type of influenza, e.g., H1N1 or H5N1. In some cases the antibody, antibody fragment or peptide immunospecifically binds to an influenza, e.g., influenza A, HA domain.

[0006] Also described are purified antibodies, antibody fragments and peptides that bind to an HA domain of (e.g., H1N1, H5N1 or both) influenza virus and comprises: (a) a VH CDR1 comprising or consisting of the amino acid sequence of a VH CDR1 in column J of Table 2; (b) a VH CDR2 comprising or consisting of the amino acid sequence of a VH CDR2 in column L of Table 2; (c) a VH CDR3 comprising or consisting of the amino acid sequence of a VH CDR3 in column N of Table 2; (d) a VL CDR1 comprising or consisting of the amino acid sequence of VL CDR1 in column J of Table 2; (e) a VL CDR2 comprising or consisting of the amino acid sequence of a VL CDR2 in column L of Table 2; and (f) a VL CDR3 comprising or consisting of the amino acid sequence of a VL CDR3 in column N of Table 2.

[0007] Also described is an isolated antibody or antibody fragment, wherein the antibody or the fragment: (i) comprises a VH chain domain comprising three CDRs and a VL chain domain comprising three CDRs; and (ii) binds an HA domain of influenza virus (e.g., H1N1, H5N1 or both) wherein the three CDRs of the VH chain domain comprise: (a) a VH CDR1 comprising the amino acid sequence of a VH CDR1 in column J of Table 2; (b) a VH CDR2 comprising the amino acid sequence of a VH CDR2 in column L of Table 2; and (c) a VH CDR3 comprising the amino acid sequence of a VH CDR3 in column N of Table 2. Also described is a purified antibody or antibody fragment, wherein the antibody or the fragment: (i) comprises a VH chain domain comprising three CDRs and a VL chain domain comprising three CDRs; and (ii) binds an HA domain of influenza virus (e.g., H1N1, H5N1 or both) wherein the three CDRs of the VL chain domain comprise: (a) a VL CDR1 comprising the amino acid sequence of VL CDR1 in column J of Table 2; (b) a VL CDR2 comprising the amino acid sequence of a VL CDR2 in column L of Table 2; and (c) a VL CDR3 comprising the amino acid sequence of a VL CDR3 in column N of Table 2.

[0008] Also described is a purified antibody or antibody fragment, wherein the antibody or the fragment binds the HA domain of an influenza virus (e.g., H1N1, H5N1 or both) and comprises a heavy chain variable domain having an amino acid sequence identical to or comprising up to 10 (e.g., up to 9, 8, 7, 6, 5, 4, 3, 2 or 1) amino acid residue substitutions relative to the amino acid sequence of the heavy chain variable domain (column H) of a selected antibody in Table 2 and comprises a light chain variable domain having an amino acid sequence identical to or comprising up to 10 (e.g., up to 9, 8, 7, 6, 5, 4, 3, 2 or 1) amino acid residue substitutions relative to the amino acid sequence of the light chain variable domain (column H) of the selected antibody in Table 2.

[0009] Also described is a purified antibody or antibody fragment, wherein the antibody or the fragment binds an HA domain of influenza virus (e.g., H1N1, H5N1 or both) and comprises a heavy chain variable domain having at least 90% or 95% identity to the amino acid sequence of the heavy chain variable domain (column H) of a selected antibody in Table 2 and comprises a light chain variable domain having at least 90% or 95% identity to the amino acid sequence of the light chain variable domain (column H) of the selected antibody in Table 2.

[0010] Also described is a purified antibody or antibody fragment, wherein the antibody or the fragment binds an HA domain of influenza virus (e.g., H1N1, H5N1 or both) and comprises a heavy chain variable domain having the amino acid sequence of the heavy chain variable domain sequence (column H) of a selected antibody in Table 2 and the light chain variable domain having the amino acid sequence of the light chain variable domain sequence (column H) of the selected antibody in Table 2.

[0011] Also described is a purified antibody or antibody fragment, wherein the antibody or the fragment binds the same epitope on an HA domain of influenza virus (e.g., H1N1, H5N1 or both) as that bound by an antibody comprising: (a) a heavy chain variable domain having the amino acid sequence of the heavy chain variable domain sequence (column H) of a selected antibody in Table 2; and (b) a light chain variable domain having the amino acid sequence of the light chain variable domain sequence (column H) of the selected antibody in Table 2.

[0012] Also described is a purified antibody or antibody fragment, wherein the antibody or the fragment binds to an HA domain of influenza virus (e.g., H1N1, H5N1 or both), comprising: (a) a polypeptide comprising an amino acid sequence identical to or having up to 5 amino acid substitutions compared to a V-D-J sequence in column F of Table 2; and (a) a polypeptide comprising an amino acid sequence identical to or having up to 5 amino acid substitutions compared to a V-J sequence in column G of Table 2.

[0013] Also described is a purified antibody or antibody fragment, wherein the antibody or the fragment binds to an HA domain of influenza virus (e.g., H1N1, H5N1 or both), comprising: (a) a polypeptide comprising an amino acid sequence identical to or having up to 5 amino acid substitutions compared to the V-D-J sequence in column F of Table 2 of a selected antibody; and (a) a polypeptide comprising an amino acid sequence identical to or having up to 5 amino acid substitutions compared to a V-J sequence in column G of Table 2 of the selected antibody.

[0014] In various embodiments the purified antibody binds the HA stalk; binds the HA globular head; neutralizes one or more strains H1N1 influenza, one or more strains of H5N1 influenza or one or more strains of both H1N1 and H5N1 influenza; has hemagglutination inhibition activity; does not have hemagglutination inhibition activity; binds to at least 3 H1 influenza strains selected from the strains in panel A of FIG. 8; binds to at least 5 H1 influenza strains selected from the strains in panel A of FIG. 8; is an IgG antibody; is an IgG1 antibody; is an IgG1, kappa antibody; is an IgG1, lambda antibody; is selected from an IgM, IgA, IgD and IgE antibody; is selected from a Fab, a F(ab′)2 fragment, a Fd fragment, an Fv fragment, a scFv, and a dAb fragment; is a monoclonal antibody; is a humanized antibody or a fully human antibody.

[0015] In some cases the antibody, antibody fragment or peptide binds or binds and neutralizes H1N1 and H1H5.

[0016] In the case of an antibody, antibody fragment or peptide comprising a CDR1, CDR2 and CDR3 (VH or VL) having 1, 2, or 3 amino acid residue substitutions or deletions relative in Table 2 to a CDR1, CDR2 or CDR3 Table 2, in some cases the substitutions are conservative and in some cases deletions are contiguous and in some case are at the amino or carboxy terminus such that the CDR contains 2, 3, 4, 5, 6, 7, 8, 9, 10, 11, 12, 13, 14, 15, 16, 17, 18 or 19 contiguous amino acids of a CDR depicted in Table 2.

[0017] In certain cases the antibody, antibody fragment or peptide comprises the heavy chain and light chain CDRs of an antibody selected from: 1009-3D06, 1009-3B05, 70-1F02 and 70-3B03.

[0018] In some cases the antibody, antibody fragment or peptide comprises:

a) a CDR1 comprising at least 7 contiguous amino acids of GMTSNSLA (SEQ ID NO. 1); a CDR2 comprising at least 7 contiguous amino acids of IIPVFETP (SEQ ID NO 2); and a CDR3 comprising at least 14 or 15 contiguous amino acids of ATSAGGIVNYYLSFNI; (SEQ ID NO. 3)
b) a CDR1 comprising GMTSNSLA (SEQ ID NO. 1); a CDR2 comprising IIPVFETP (SEQ ID NO 2); and a CDR3 comprising ATSAGGIVNYYLSFNI (SEQ ID NO. 3)
c) a heavy chain variable domain comprising: a CDR1 comprising GMTSNSLA (SEQ ID NO. 1); a CDR2 IIPVFETP (SEQ ID NO. 2); and a CDR3 comprising ATSAGGIVNYYLSFNI (SEQ ID NO. 3);
d) a heavy chain variable domain comprising:

(SEQ ID NO. 4)
QVQLVQSGAEVKKPGSSVKVSCKASGMTSNSLAISWVRQAPGQGLEWMG
GIIPVFETPKYAQKFQGRVTITADKSTNTAYMDLISLKSEDTAMYYCA;

e) a CDR1 comprising at least 5 contiguous amino acids of QTITTW (SEQ ID NO. 5); a CDR2 comprising at least 2 contiguous amino acids of KTS; and a CDR3 comprising at least 8 contiguous amino acids of QQYSTYSGT (SEQ ID NO. 6);
f) a CDR1 comprising QTITTW (SEQ ID NO. 5); a CDR2 comprising KTS; and a CDR3 comprising QQYSTYSGT (SEQ ID NO. 6);
g) a light chain variable domain comprising: a CDR1 comprising QTITTW (SEQ ID NO. 5); a CDR2 comprising KTS; and a CDR3 comprising QQYSTYSGT (SEQ ID NO. 6);
h) a light chain variable domain comprising:

(SEQ ID NO. 7)
DIQMTQSPSTLSASVGDRVTITCRASQTITTWLAWYQQKPGQAPKLLIH
KTSTLETGVPSRFSGSGSGTQFTLTITNLQPDDSATYYCQQYSTY

[0019] In some cases the antibody, antibody fragment or peptide comprises:

a) a CDR1 comprising at least 8 contiguous amino acids of GGTSNNYP (SEQ ID NO. 8); a CDR2 comprising at least 7 contiguous amino acids of SIPIFNTP (SEQ ID NO. 9); and a CDR3 comprising at least 14 or 15 contiguous amino acids of ATSAGGIVNYFLLFDI (SEQ ID NO. 10)
b) a CDR1 comprising GGTSNNYP (SEQ ID NO. 8); a CDR2 comprising SIPIFNTP (SEQ ID NO. 9); and a CDR3 comprising ATSAGGIVNYFLLFDI (SEQ ID NO. 10);
c) a heavy chain variable domain comprising: a CDR1 comprising GGTSNNYP (SEQ ID NO. 8); a CDR2 comprising SIPIFNTP (SEQ ID NO. 9); and a CDR3 comprising ATSAGGIVNYFLLFDI (SEQ ID NO. 10);
d) a heavy chain variable domain comprising:

(SEQ ID NO. 11)
QVQLVQSGAELKKPGSSVKVSCKTSGGTSNNYPISWVRQAPGQGLEWMG
GSIPIFNTPKYGKKFQGRVTITSDTSTSTAYMELSSLRSDDTAIYYCA;

e) a CDR1 comprising at least 5 contiguous amino acids of QSISDW (SEQ ID NO. 12); a CDR2 comprising at least 2 contiguous amino acids of KAS; and a CDR3 comprising at least 8 contiguous amino acids of QHYNTYSGT (SEQ ID NO. 13);
f) a CDR1 comprising QSISDW (SEQ ID NO. 12); a CDR2 comprising KAS; and a CDR3 comprising QHYNTYSGT (SEQ ID NO. 13);
g) a light chain variable domain comprising: a CDR1 comprising QSISDW; a CDR2 comprising KAS; and a CDR3 comprising QHYNTYSGT (SEQ ID NO. 13);
h) a light chain variable domain comprising:

(SEQ ID NO. 14)
DIQMTQSPSTLSASVGDRVTIACRASQSISDWLAWYQQKPGKAPKLLIH
KASSLESGVPSRFSGGGSGTEFTLTISSLQADDSATYYCQHYNTY.

[0020] In some cases the antibody, antibody fragment or peptide comprises:

a) a CDR1 comprising at least 8 contiguous amino acids of GGIFRSNA (SEQ ID NO. 15); a CDR2 comprising at least 7 contiguous amino acids of IIAVFGTA (SEQ ID NO. 16); and a CDR3 comprising at least 14 or 15 contiguous amino acids of ARGPYYYGNSHLDF (SEQ ID NO. 17)
b) a CDR1 comprising GGIFRSNA (SEQ ID NO. 15); a CDR2 comprising IIAVFGTA (SEQ ID NO. 16); and a CDR3 comprising ARGPYYYGNSHLDF (SEQ ID NO. 17);
c) a heavy chain variable domain comprising: a CDR1 comprising GGIFRSNA (SEQ ID NO. 15); a CDR2 comprising IIAVFGTA (SEQ ID NO. 16); and a CDR3 comprising ARGPYYYGNSHLDF (SEQ ID NO. 17);
d) a heavy chain variable domain comprising:

(SEQ ID NO. 18)
QVQLVQSGAEVKKPGSSVKVSCRASGGIFRSNAISWVRQAPGQGLEWMG
EIIAVFGTANYAQKFQGRVTITADESTSTAYMELSSLRSEDTAVYYCA;

e) a CDR1 comprising at least 5 contiguous amino acids of QSVSSNY (SEQ ID NO. 19); a CDR2 comprising at least 2 contiguous amino acids of GAS; and a CDR3 comprising at least 8 contiguous amino acids of QQYGTSPRT (SEQ ID NO.20);
f) a CDR1 comprising QSVSSNY (SEQ ID NO. 19); a CDR2 comprising FAS; and a CDR3 comprising QQYGTSPRT (SEQ ID NO. 20);
g) a light chain variable domain comprising: a CDR1 comprising QSVSSNY (SEQ ID NO. 19); a CDR2 comprising GAS; and a CDR3 comprising QQYGTSPRT (SEQ ID NO. 20);
h) a light chain variable domain comprising:

(SEQ ID NO. 21)
EIVLTQSPGTLSLSPGERATLSCRASQSVSSNYLAWYQQKPGQAPRLLI
YGASNRATGIPDRFSGSGSGTDFTLAISRLEPEDFAVYYCQQYGTSP.

[0021] Also described is a sterile composition comprising the purified antibody or antibody fragment and a sterile composition comprising the purified antibody or antibody fragment and a pharmaceutically acceptable carrier.

[0022] Also described is an isolated nucleic acid encoding the antibody or antibody fragment; a vector comprising the nucleic acid; a host cell comprising the vector or nucleic acid. Also descried are method for reducing the risk of infection with H1N1 and/or H5N1 influenza virus in a human subject, the method comprising administering the antibody or antibody fragment; a method for treating a human subject infected with H1N1 and/or H5N1 influenza virus, the method comprising administering the antibody or antibody fragment; a method of preventing H1N1 and/or H5N1 influenza disease in a human subject, said method comprising administering the antibody or antibody fragment; and a method of ameliorating one or more symptoms associated with an H1N1 and/or H1N1 influenza infection in a human subject, the method comprising administering the antibody or antibody fragment.

[0023] Also described is an antibody that binds the same epitope of HA as does: 1009-3D06, 1009-3B05, 70-1F02 and 70-3B03. Also described is a peptide that comprises the HA epitope bound by at least one of the following antibodies: 1009-3D06, 1009-3B05, 70-1F02 and 70-3B03. Also described is a pharmaceutical composition (e.g., a composition capable of eliciting an immune response to H1N1) comprising: 1) a peptide that comprises the HA epitope bound by at least one of the following antibodies: 1009-3D06, 1009-3B05, 70-1F02 and 70-3B03; 2) an adjuvant suitable for administering to a human patient. Also described is a method for eliciting an immune response in a patient by administering a peptide that comprises the HA epitope bound by at least one of the following antibodies: 1009-3D06, 1009-3B05, 70-1F02 and 70-3B03; and an optional adjuvant suitable for administering to a human.

### DESCRIPTION OF THE FIGURES

[0024] FIG. 1: Generation of human mAbs against pandemic H1N1 influenza virus from infected patients. (FIG. 1A is a representative ELISPOT. Numbers of plasmablasts secreting antibody reactive to pandemic H1N1 is compared to the total number of IgG-secreting cells from each PBMC sample (numerals). All ELISPOT assays were performed in duplicate. FIG. 1B is a summary of all the donors analyzed; each dot represents one patient or control. Both FIG. 1A and FIG. 1B shows Magnitude of the plasmablast response observed in peripheral blood of 6 pandemic H1N1 infected patients and 22 healthy (non-infected/non-vaccinated) donors by ELISPOT analysis. FIG. 1C shows the y specificity of the sorted plasmablasts measured by ELISPOT analysis. Representative ELISPOT showing plasmablasts producing antibodies reactive with total IgG or pandemic H1N1 whole virus, annual influenza vaccine (2009/2010 TIV vaccine), or recombinant HA from pandemic H1N1, the previous year's annual vaccine H1N1 strain (A/Brisbane/59/2007), or the previous year's H3N2 strain (A/Brisbane/10/2007). FIG. 1D is a summary of the frequency of whole IgG secreting cells specific pandemic H1N1 whole virus, recombinant HA from pandemic H1N1 and recombinant HA from the previous year's vaccine. Donors EM1 and SF1000 were not analyzed in this fashion as the antigens were not available for live-cell analyses at that time early in the pandemic. FIG. 1E shows the sorting of plasmablast cells from pandemic H1N1 influenza infected patients to generate mAbs. Flow cytometry plots show percentage of CD27^{hi}CD38^{hi} cells (dot plots are gated on CD3⁻CD20^{lo/-} lymphocytes). The plasmablasts are defined herein as CD3⁻CD20^{lo/-} CD19⁺CD38^{hi}CD27^{hi} cells. The right panel shows an example of post-sort purity of ungated cells (verified for each sample). Single plasmablasts were isolated from the sorted fraction by cell sorting, and variable antibody genes were cloned from individual cells (see Materials and Methods). (F, G) FIG. 1F is scatchardplots of binding of the isolated mAbs to pandemic H1N1 whole purified virus, FIG. 1G is scatchardplots of binding of the isolated mAbs to pandemic HINI recombinant HA as measured by ELISA. Antibodies were scored positive (frequency above plots) if they bound at least 2 standard deviations greater than the mean absorbance of naïve B cell antibodies at 10 ug/ml (detailed in FIG. 7A). Antibodies were tested at 10 ug/ml and 3-fold serial dilutions until a non-binding concentration was determined. Each antibody was tested in at least two (and typically more) replicates for specificity and affinity estimations. *Note that only 14 of 15 HA-binding antibodies have curves in FIG. 1G, because one of the HA-reactive antibodies only binds HA on whole virions, not on the recombinant protein.

[0025] FIG. 2. Plasmablasts induced by pandemic H1N1 infection are highly cross-reactive and have accumulated particularly high levels of variable gene somatic hypermutation. FIG. 2A shows Pandemic H1N1 reactive mAbs isolated from infected patients (1000, EM, 70, 1009) were assayed for binding to annual H1N1 influenza strain whole virus. The minimum detectable concentration is defined as two standard deviations above the mean binding of 48 randomly chosen naïve B cell antibodies (FIG. 7A). Bars are color coded to approximate levels of cross-reactivity to the annual vaccine (circulating) strains of recent years. In FIG. 2B Panels A and B use the same color scheme. Each value is representative of at least two replicate ELISAs repeated until a single consistent minimum concentration was established. Center numeral equals total antibodies. FIG. 2C is an analysis of the variable gene sequences from plasmablasts of the four pandemic H1N1 infected patients indicated that approximately 16.5% of the pandemic H1N1 induced plasmablasts were clonally-related (shared identical VH and JH genes and CDR3 junctions). FIG. 2D shows the average number of somatic hypermutations in the pandemic H1N1 patient plasmablast variable region genes compared to primary IgG plasmablast responses to vaccinia (small pox) or the anthrax vaccine, or after at least 4 boosters with the anthrax vaccine. To account for the obvious outlier in the pandemic H1N1 group (patient-EM), median values are indicated by the bar. Students t-tests excluding the outlier indicated a p-value of <0.04 for the remaining five pandemic H1N1 samples compared to the IgG memory and GC cells or the primary IgG plasmablast responses (0.2 with EM included), and <0.0001 against the IgM populations. Notably, besides patient-EM, each individual set of VH genes averaged significantly more mutations than the IgG memory and GC or the primary responses (FIG. 9A). Each point represents one individual donor and is averaged from 25 to 75 sequences except for the primary response to anthrax from which only 10 VH genes could be cloned from single cells do to the highly limited response. Mutations accumulated per individual sequence are depicted in FIG. 9. Detailed sequence characteristics are provided in FIGS. 11-13 for antibodies confirmed as binding H1NI and in FIGS. 14-16 for antibodies that have not been characterized. The naïve, IgG and IgM GC and memory populations are derived from historical data (Koelsch et al., 2007; Wrammert et al., 2008; Zheng et al., 2005; Zheng et al., 2004).

[0026] FIG. 3. HA specific antibodies induced by pandemic H1N1 infection bind cross-reactive neutralizing epitopes.) FIG. 3A shows In vitro functional analysis of 15 antibodies from indicated patients that bound pandemic H1N1 influenza recombinant HA protein. The left panel shows HAI (HA-inhibition) minimum effective antibody concentration, the middle panel shows PRNT50 plaque reduction neutralization minimum effective antibody concentration, and the right panel shows ELISA binding summarized as minimum positive concentration (defined for FIG. 2) against recombinant HA (original curves are in FIG. 1F and FIG. 8A). The antibodies are grouped based on whether they show HAI and/or neutralizing (neut) function. Antibody 1009-3B06 was only tested for binding to whole virus as this antibody did not bind to rHA due to binding of a quaternary or conformationally sensitive epitope that is not present in the recombinant protein. HAI and neutralization assays were performed in duplicate and repeated at least three times. ELISA curves are provided in FIG. 8A. FIG. 3B shows ELISA binding as shown by minimum positive concentration (defined for FIG. 2) of neutralizing mAbs to rHA or whole virions from pandemic H1N1 or other influenza strains (ELISA binding curves are provided in FIG. 8A). Three binding patterns (epitopes 1 and 2, and 3) were observed that coincided with specificity comparisons by competitive ELISA as illustrated in FIG. 4A. FIG. 3C is representative neutralizing antibodies (EM-4C04, 70-1F02, 1009-3B06) were used for HAI and micro-neutralization (MN) activity against pandemic H1N1 and several other annual or laboratory H1N1 influenza strains. Experiments were performed in duplicates and repeated at least three times. Minimum effective concentration is shown for both assays.

[0027] FIG. 4. The neutralizing antibodies bind to three non-overlapping epitopes in either the stalk or the globular head of the HA molecule. In FIG. 4A, competition ELISA assays were used to determine the similarity in specificity between the various neutralizing antibodies. Shown is the percent competition of each antibody in an ELISA binding assay against all other neutralizing antibodies. A ten-fold molar excess of unlabeled antibody was used to inhibit a biotinylated antibody. Percent competition is calculated as the reduction in absorbance relative to the level of inhibition of any particular antibody against itself. Colors indicate degree of inhibition of antibody binding as indicated. Antibody C179 is a commercial antibody that binds to the stalk region of the HA molecule identifying epitope-1. Epitope-2 and -3 are each on the HA-head active site. 1000-2G06 and the non-neutralizing but HA binding antibodies had no competition with any of the other HA-reactive antibodies and are therefore not shown. VH gene usage of the individual antibodies is listed on the right. All assays were performed in duplicate. In FIG. 4B, plasmids encoding full-length wild type (WT) H5-TH04 (A/Thailand/2-SP-33/2004 (H5N1)) and its mutants were transiently transfected into 293T cells. 24 hours after transfection, cells were harvested for FACS analysis, and binding of indicated antibodies were tested at 10 μg/mL. The cell surface HA expression of each of the mutants were verified with a ferret anti-H5N1 serum (data not shown). Antibody F10 was one of the antibodies used to characterize the HA-stalk epitope by X-ray crystallography (Sui, 2009) and served as a positive control for the binding pattern expected of HA stalk reactive antibodies to these HA mutants.

[0028] FIG. 5. In vivo prophylactic and therapeutic efficacy of human mAbs against pandemic H1N1 influenza virus. 6-8 week old Balb/c mice were infected with a 3×LD50 dose of highly pathogenic, mouse-adapted 2009 pandemic H1N1 influenza (A/California/04/09). 24, 48 and 60 hours after infection 200 ug (10 mg/kg of body weight) of EM-4C04, 70-F02 or 1009-3B06 human mAb were injected intraperitoneally. All mice were monitored daily for body weight changes and any signs of morbidity and mortality. Percent of initial body weight is plotted and number of surviving mice is shown in the lower right of each plot. Infected, untreated mice showed clear signs of sickness around day 4-5 post-infection and perished by day 8-9. Prophylactic treatment is shown on the left for comparison. Antibody treatment conferred significant protection as determined by comparison of weights in untreated versus prophylaxis, and at the time of treatment versus 12 days post-infection (unpaired, two-tailed students t-test p<0.05). The log-rank test indicated significant survival as well (p<0.001). Figure shows one representative experiments of at least three independent repeat experiments.

[0029] FIG. 6. Breadth of in vivo prophylactic efficacy in mice. 6-8 week old Balb/c mice were treated with 200 ug (10 mg/kg of body weight) EM-4C04, 70-1F02 or 1009-3B06 human mAb intra-peritoneally, Control mice were treated with PBS only, a control mAb or polyclonal human IgG. 12 hours later they were challenged with a 3×LD50 dose of mouse adapted pandemic H1N1, PR/8/34 or FM/1/47 influenza virus. All mice were monitored daily for body weight changes and any signs of morbidity and mortality. Percent of initial body weight (left) and survival curves (right) are plotted. Infected, untreated mice showed clear signs of sickness around day 4-5 post infection and perished by day 8-9. Figure shows one representative experiments of at least three independent repeat experiment. Antibody treatment conferred significant protection as determined by comparison of weights in untreated versus prophylaxis, and at the time of treatment versus 12 days post-infection (unpaired, two-tailed students t-test p<0.05). The log-rank test indicated significant survival as well (p<0.003).

[0030] FIG. 7. Binding characteristics of control mAbs. In FIG. 7A, Naïve antibody cross-reactivity levels were used to establish thresholds for scoring antibodies as positive against the pandemic H1N1 influenza strains. A set of 48 naïve antibodies were screened by ELISA for binding to the pandemic H1N1 influenza strain at concentrations beginning at 10 ug/ml and three 3-fold dilutions (the same initial concentration used to test the anti-H1N1 plasmablast antibodies). We assigned the minimum binding threshold at 2 standard deviations (2×SD) above the mean absorbance for the naïve antibodies at 10 ug/ml (left). Overall binding of curves of the naïve antibodies relative to this threshold are also provided. All ELISA assays were performed in duplicate. In FIG. 7B, annual vaccine induced antibodies generated against past influenza strains prior to the 2009 pandemic H1N1 pandemic are only approximately one-third (22%) as likely to cross-react with the pandemic H1N1 strain than the inverse (FIGS. 2A and 2B, 63% of the pandemic H1N1-induced antibodies cross-react with past annual strains). We had generated 50 mAbs following annual vaccination prior to the pandemic. Binding of these pre-pandemic mAbs to annual strains is presented in the left panel and to the pandemic H1N1 strain on the right panel. These analyses were performed at least twice.

[0031] FIG. 8. Binding characteristics of the neutralizing mAbs. (A)In FIG. 8A, ELISA binding curves for multiple recombinant HA proteins and whole purified virus from different influenza strains for the 11 mAbs that neutralize pandemic H1N1 infectivity in vitro. These data were used for the summary analysis in FIG. 3 panels A and C. The ELISA assays were perform at least twice. In FIG. 8B, Antibody avidities were determined by Biacore Surface Plasmon Resonance (SPR) and ELISA. Antibodies 1009-3B06, 1000-3E01, and 1000-2G06 could not be determined because these mAbs did not bind to the recombinant HA protein from baculovirus sufficiently well for SPR. Avidities for these mAbs and for the antibodies that did not neutralize infection in vitro were estimated by Scatchard plot analyses of ELISA data (shown in parentheses). Three replicates were performed for the SPR analyses.

[0032] FIG. 9. Pandemic H1N1 induced plasmablasts have accumulated large numbers of somatic mutations. In FIG. 9A, similar to the results based on mutations averaged by donor, mutation frequency considered by each individual VH gene are also particularly high in the pandemic H1N1 patient plasmablast samples, comparable to annual influenza and repeated anthrax-booster responses. FIG. 9B shows an analysis of the variable gene repertoire indicated that cross-reactive antibodies binding pandemic H1N1 better than annual H1N1 strains have significantly more combined VH and VL mutations, suggesting accumulation after further affinity maturation of memory cells. Extraction of mutation numbers from the broadly cross-reactive antibodies indicates that in general they are from highly mutated variable genes as well. Statistical comparisons were made using student's t tests. The data points (variable genes) are grouped by hypothetical origins as described in the text. In total, the variable genes encoding cross-reactive antibodies as a single grouping also had significantly more somatic mutations than the pandemic H1N1 specific antibody genes (p=0.03). The frequency of mutations was significantly greater than the IgG controls for all donors except EM (t-test p<0.05).

[0033] FIG. 10. Therapeutic control of pandemic H1N1 viral titers in lungs after mAb treatment. 6-8 week old Balb/c mice were infected with a lethal 3×LD50 dose of mouse adapted pandemic H1N1 and treated with 200 ug given i.p. EM4C04 48 hours later. Lung tissue was removed from groups of 5 mice per timepoint at 4, 6 and 12 days post infection. Lung viral titers were determined by plaque assay on MDCK cells and are reported as pfu per gram tissue.

[0034] FIG. 11 (Table 2). Amino acid sequence information for H1N1 binding antibodies. Table 2 provides detailed information, including sequence information, about each of the antibodies that were confirmed to bind influenza. Each antibody is identified in Col. A by antibody name and an indication of whether the heavy or light chain is being described. Heavy chains are indicated by H1, H2 or H3 and light chains are indicated by K1, K2, K3 or K4 at the end of the identifier in Col. A. Thus, line 2 of Table 2 describes 1000-1B02H, which is a heavy chain for one of the cloned antibodies, and line 3 of Table 2 describes 1000-1B02K2, which is the light chain for the same antibody. Accordingly, each pair of lines (e.g. 2/3, 4/5, 5/6, 8/9. 10/11, 12/13, 14/15, 16/17, 18/19, 20/21, 22/23, 24/25, 26/27, 28/29, 20/31, 32/33, 34/35, 36/37, 38/39, 40/41, 42/43, 44/45, 46/47, 48/49, 50/51, 52/53, 54/55, 56/57, 58/59, 60/61, 62/63, 64/65, 66/67, 68/69, 70/71, 72/73, 74/75, 76/77, 78/79, 80/81, 82/83, 84/85, 86/87, 88/89, 90/91, and 92/93) represent paired heavy and light chains from a cloned human antibody. Col. B indicates whether the clone was productive. Col. C provides the V gene and V gene allele; Col. E provides the J gene and J allele. Col. E provides the D gene and allele (for heavy chains). Col. F provides the V-D-J region amino acid sequence (for heavy chains). Col. G provides the V-J region amino acid sequence (for light chains). Col. H provides the V-region amino acid sequence. Col. I provides the FR1 amino acid sequence. Col. J provides the CDR1 amino acid sequence. Col. K provides the FR2 amino acid sequence. Col. L provides the CDR2 amino acid sequence. Col. M provides the FR3 amino acid sequence. Col. N provides the CDR3 amino acid sequence. Col. O provides the junction amino acid sequence. Col. P provides the J-region amino acid sequence. Col. Q provides the FR4 amino acid sequence. In this table the information for the heavy chain of 1000-3D04 (rows labeled 1000-3D0H2) should be replaced with the following information:

[0035] V gene and allele: IGHV1-69*01 F; J gene and allele: IGHJ6*03 F; D gene and allele:

IGHD3-3*01 F; V-D-J region:
(SEQ ID NO. 22)
QVQLVQSGAEVKKPGSSVKVSCRASGGTFSSFAVSWVRQAPGQGLEWMGGIIGMF
GTTKYAQRFLGRVTITADESTSSAYMELSSLTSEDTAVYYCARPGDYRTIRYYHFF
MDVWGKGTTVTVSS;
V region:
(SEQ ID NO. 23)
QVQLVQSGAEVKKPGSSVKVSCRA
SGGTFSSFAVSWVRQAPGQGLEWMGGIIGMFGTTKYAQRFLGRVTITADESTSSAY
MELSSLTSEDTAVYYCAR;
FR1-IMGT:
(SEQ ID NO. 24)
QVQLVQSGAEVKKPGS
SVKVSCRAS;
CDR1-IMGT:
(SEQ ID NO. 25)
GGTFSSFA;
FR2-IMGT:
(SEQ ID NO. 26)
VSWVRQAPGQGLEWMGG;
CDR2-IMGT:
(SEQ ID NO. 27
IIGMFGTT;
FR3-IMGT:
(SEQ ID NO. 28)
KYAQRFLGRVTITADESTSSAYMELSSL
TSEDTAVYYC;
CDR3-IMGT:
(SEQ ID NO. 29)
ARPGDYRTIRYYHFFMDV;
JUNCTION:
(SEQ ID NO. 30)
CARPGDYRTIRYYHFFMDVW;
J-REGION:
(SEQ ID NO. 31)
FFMDVWGKGTTVTVSS;
and
FR4-IMGT:
(SEQ ID NO. 32)
WGKGTTVTVSS.

[0036] FIG. 12 (Table 3). General information for H1N1 binding antibodies. Table 3 provides additional information about the antibodies in Table 2 (FIG. 11). Columns A-C are as in Table 2. Column D is the V-region score; column E is the V-region % identity; column F is the V-region % identify at the nucleotide level; column G is the J-gene and allele; column I is the J-region % identity; column J is the J-region % identify at the nucleotide level; column K is the D-gene and allele; column L is the D-region reading frame; column M is the CDR1-imgt length; column N is the CDR2-imgt length; column O is the CDR3-imgt length; column P is the CDR-imgt lengths; column Q is the FR-imgt length; column R is the AA junction; column S indicates the frame of the junction; column T indicates the orientation; column U has functionality comments; column V has information regarding the potential for V-region inserts or deletions; column W has comments on the J-gene and allele; and column X provides the nucleotide sequence.

[0037] FIG. 13 (Table 4). Nucleotide sequence information for H1N1 binding antibodies. Table 4 provides additional information about the antibodies in Table 2 (FIG. 11). Columns A-E are as in Table 2. Col. F provides the V-D-J region nucleotide sequence (heavy chains). Col. G provides the V-J region nucleotide sequence (for light chains). Col. H provides the V-region nucleotide sequence. Col. I provides the FR1 nucleotide sequence. Col. J provides the CDR1 nucleotide sequence. Col. K provides the FR2 nucleotide sequence. Col. L provides the CDR2 nucleotide sequence. Col. M provides the FR3 nucleotide sequence. Col. N provides the CDR3 nucleotide sequence. Col. O provides the junction nucleotide sequence. Col. P provides the 3′ V-region nucleotide sequence. Col. Q provides the N and D region nucleotide sequence. Column R provides the P 3′V nucleotide sequence. Column S provides the N-region nucleotide sequence. Column T provides the N1-region nucleotide sequence. Column U provides the P 5′D nucleotide sequence. Column V provides the D-region nucleotide sequence. Column W provides the P 3′D-region nucleotide sequence. Column X provides the N2-region nucleotide sequence. Column Y provides the P 5′ J nucleotide sequence. Column Z provides the 5′J-region nucleotide sequence. Column AA provides the D-J-region nucleotide sequence. Column AB provides the J-region nucleotide sequence. Column AC provides the FR3 nucleotide sequence. In this table the information for the heavy chain of 1000-3D04 (rows labeled 1000-3D0H2) should be replaced with the following information.

V-D-J-REGION:
(SEQ ID NO. 33)
caggtgcagctggtgcagtctggggctgaggtgaagaagcctgggtcctccgtgaaggtctcctgcagggcgtctggaggcacct
tcagcagctttgctgtcagctgggtgcgacaggcccctggacaaggacttgaatggatgggagggatcatcggtatgtttgggaca
acaaaatacgcacagaggttcctgggcagagtcacgattaccgcggacgagtctacgagctcagcctacatggagctgagcagcc
tgacatctgaggacacggccgtgtattattgtgcgagaccgggtgattatcgaaccattagatactatcacttettcatggacgtctggg
gcaaagggaccacggtcaccgtctcctca
V-REGION:
(SEQ ID NO. 34)
Caggtgcagctggtgcagtctggggctgaggtgaagaagcctgggtcctccgtgaaggtctcctgcagggcgtctggaggcacc
ttcagcagctttgctgtcagctgggtgcgacaggcccctggacaaggacttgaatggatgggagggatcatcggtatgtttgggaca
acaaaatacgcacagaggttcctgggcagagtcacgattaccgcggacgagtctacgagctcagcctacatggagctgagcagcc
tgacatctgaggacacggccgtgtattattgtgcgaga
FR1-IMGT:
(SEQ ID NO. 35)
caggtgcagctggtgcagtctggggctgaggtgaagaagcctgggtcctccgtgaaggtctcctgcagggcgtct
CDR1-IMGT:
(SEQ ID NO. 36)
ggaggcaccttcagcagctttgct
FR2-IMGT:
(SEQ ID NO. 37)
gtcagctgggtgcgacaggcccctggacaaggacttgaatggatgggaggg
CDR2-IMGT:
(SEQ ID NO. 38)
atcatcggtatgtttgggacaaca
FR3-IMGT:
(SEQ ID NO. 39)
aaatacgcacagaggttcctgggcagagtcacgattaccgcggacgagtctacgagctcagcctacatggagctgagcagcctga
catctgaggacacggccgtgtattattgt
CDR3-IMGT:
(SEQ ID NO. 40)
gcgagaccgggtgattatcgaaccattagatactatcacttcttcatggacgtc
JUNCTION:
(SEQ ID NO. 41)
tgtgcgagaccgggtgattatcgaaccattagatactatcacttcttcatggacgtctgg
3′V REGION:
tgtgcgaga
(N-D)-J-REGION:
(SEQ ID NO. 42)
ccgggtgattatcgaaccattagatactatcacttcttcatggacgtctggggcaaagggaccacggtcaccgtctcctca
(N-D)-REGION:
(SEQ ID NO. 43)
ccgggtgattatcgaaccattagatactatc
N1-REGION:
ccgg
D-REGION:
(SEQ ID NO. 44)
gtgattatcgaacc
N2-REGION:
(SEQ ID NO. 45)
attagatactatc
5′J-REGION
(SEQ ID NO. 46)
acttcttcatggacgtctgg
D-J-REGION:
(SEQ ID NO. 47)
gtgattatcgaaccattagatactatcacttettcatggacgtctggggcaaagggaccacggtcaccgtctcctca
J-REGION:
(SEQ ID NO. 48)
acttcttcatggacgtctggggcaaagggaccacggtcaccgtctcctca
FR4-IMGT:
(SEQ ID NO. 49)
tggggcaaagggaccacggtcaccgtctcctca

[0038] FIG. 14 (Table 5). Amino acid sequence information for antibodies not tested for H1N1 binding. Table 5 provides detailed information, including sequence information, about certain antibodies that were not tested for binding to influenza. Each antibody is identified in Col. A by antibody name and an indication of whether the heavy or light chain is being described. Heavy chains are indicated by H1, H2 or H3 and light chains are indicated by K1, K2, K3 or K4 at the end of the identifier in Col. A. Col. B indicates whether the clone was productive. Column C provides the V gene and V gene allele. Column D provides the J gene and J allele. Column. E provides the D gene and allele (for heavy chains). Column F provides the V-D-J region amino acid sequence (for heavy chains). Column G provides the V-J region amino acid sequence (for light chains). Column H provides the V-region amino acid sequence. Column I provides the FR1 amino acid sequence. Column provides the CDR1 amino acid sequence. Column K provides the FR2 amino acid sequence. Column L provides the CDR2 amino acid sequence. Column M provides the FR3 amino acid sequence. Column N provides the CDR3 amino acid sequence. Column O provides the junction amino acid sequence. Column P provides the J-region amino acid sequence. Column Q provides the FR4 amino acid sequence.

[0039] FIG. 15 (Table 6). General information for antibodies not tested for H1N1 binding. Table 6 provides additional information about the antibodies in Table 5 (FIG. 14). Columns A-C are as in Table 5. Column D is the V-region score; column E is the V-region % identity; column F is the V-region % identify at the nucleotide level; column G is the J-gene and allele; column I is the J-region % identity; column J is the J-region % identify at the nucleotide level; column K is the D-gene and allele; column L is the D-region reading frame; column M is the CDR1-imgt length; column N is the CDR2-imgt length; column O is the CDR3-imgt length; column P is the CDR-imgt lengths; column Q is the FR-imgt length; column R is the AA junction; column S indicates the frame of the junction; column T indicates the orientation; column U has functionality comments; column V has information regarding the potential for V-region inserts or deletions; column W has comments on the J-gene and allele; and column X provides the nucleotide sequence.

[0040] FIG. 16 (Table 7). Nucleotide sequence information for antibodies not tested for H1N1 binding. Table 7 provides additional information about the antibodies in Table 5 (FIG. 14). Columns A-E are as in Table 5. Col. F provides the V-D-J region nucleotide sequence (heavy chains). Col. G provides the V-J region nucleotide sequence (for light chains). Col. H provides the V-region nucleotide sequence. Col. I provides the FR1 nucleotide sequence. Col. J provides the CDR1 nucleotide sequence. Col. K provides the FR2 nucleotide sequence. Col. L provides the CDR2 nucleotide sequence. Col. M provides the FR3 nucleotide sequence. Col. N provides the CDR3 nucleotide sequence. Col. O provides the junction nucleotide sequence. Col. P provides the 3′ V-region nucleotide sequence. Col. Q provides the N and D region nucleotide sequence. Column R provides the P 3′V nucleotide sequence. Column S provides the N-region nucleotide sequence. Column T provides the N1-region nucleotide sequence. Column U provides the P 5′D nucleotide sequence. Column V provides the D-region nucleotide sequence. Column W provides the P 3′D-region nucleotide sequence. Column X provides the N2-region nucleotide sequence. Column Y provides the P 5′ J nucleotide sequence. Column Z provides the 5′J-region nucleotide sequence. Column AA provides the D-J-region nucleotide sequence. Column AB provides the J-region nucleotide sequence. Column AC provides the FR3 nucleotide sequence.

### DETAILED DESCRIPTION

[0041] The present invention provides antibodies, including human and/or humanized forms, as well as fragment, derivatives/conjugates and compositions thereof that bind to an HA domain of the H1N1 influenza virus. Certain of the antibodies can neutralize multiple H1N1 strains and certain antibodies can neutralize multiple H1N1 and H5N1 strains. Anti-influenza antibodies are also herein referred to as antibodies of the invention.

[0042] As used herein, the terms “antibody” and “antibodies”, also known as immunoglobulins, encompass monoclonal antibodies (including full-length monoclonal antibodies), spolyclonal antibodies, multispecific antibodies formed from at least two different epitope binding fragments (e.g., bispecific antibodies), human antibodies, humanized antibodies, camelised antibodies, chimeric antibodies, single-chain Fvs (scFv), single-chain antibodies, single domain antibodies, domain antibodies, Fab fragments, F(ab′)2 fragments, antibody fragments that exhibit the desired biological activity (e.g. the antigen binding portion), disulfide-linked Fvs (dsFv), and anti-idiotypic (anti-Id) antibodies (including, e.g., anti-Id antibodies to antibodies of the invention), intrabodies, and epitope-binding fragments of any of the above. In particular, antibodies include immunoglobulin molecules and immunologically active fragments of immunoglobulin molecules, i.e., molecules that contain at least one antigen-binding site. Immunoglobulin molecules can be of any isotype (e.g., IgG, IgE, IgM, IgD, IgA and IgY), subisotype (e.g., IgG1, IgG2, IgG3, IgG4, IgA1 and IgA2) or allotype (e.g., Gm, e.g., G1m(f, z, a or x), G2m(n), G3m(g, b, or c), Am, Em, and Km(1, 2 or 3)). Antibodies may be derived from any mammal, including, but not limited to, humans, monkeys, pigs, horses, rabbits, dogs, cats, mice, etc., or other animals such as birds (e.g. chickens).

[0043] Native antibodies are usually heterotetrameric glycoproteins of about 150,000 daltons, composed of two identical light (L) chains and two identical heavy (H) chains. Each light chain is linked to a heavy chain by one covalent disulfide bond, while the number of disulfide linkages varies between the heavy chains of different immunoglobulin isotypes. Each heavy and light chain also has regularly spaced intrachain disulfide bridges. Each heavy chain has at one end a variable domain (VH) followed by a number of constant domains (CH). Each light chain has a variable domain at one end (VL) and a constant domain (CL) at its other end; the constant domain of the light chain is aligned with the first constant domain of the heavy chain, and the light chain variable domain is aligned with the variable domain of the heavy chain. Light chains are classified as either lambda chains or kappa chains based on the amino acid sequence of the light chain constant region. The variable domain of a kappa light chain may also be denoted herein as VK.

[0044] The antibodies of the invention include full length or intact antibody, antibody fragments, native sequence antibody or amino acid variants, human, humanized, post-translationally modified, chimeric or fusion antibodies, immunoconjugates, and functional fragments thereof. The antibodies can be modified in the Fc region to provide desired effector functions or serum half-life. As discussed in more detail in the sections below, with the appropriate Fc regions, the naked antibody bound on the cell surface can induce cytotoxicity, e.g., via antibody-dependent cellular cytotoxicity (ADCC) or by recruiting complement in complement dependent cytotoxicity (CDC), or by recruiting nonspecific cytotoxic cells that express one or more effector ligands that recognize bound antibody on a influenza cell and subsequently cause phagocytosis of the influenza cell in antibody dependent cell-mediated phagocytosis (ADCP), or some other mechanism. Alternatively, where it is desirable to eliminate or reduce effector function, so as to minimize side effects or therapeutic complications, certain other Fc regions may be used. The Fc region of the antibodies of the invention can be modified to increase the binding affinity for FcRn and thus increase serum half-life. Alternatively, the Fc region can be conjugated to PEG or albumin to increase the serum half-life, or some other conjugation that results in the desired effect.

[0045] Naturally-occurring antibodies are immunoglobulin molecules comprised of four polypeptide chains, two heavy (H) chains and two light (L) chains inter-connected by disulfide bonds. Each heavy chain is comprised of a heavy chain variable region (VH) and a heavy chain constant region. The heavy chain constant region is comprised of three domains, CH1, CH2 and CH3. Each light chain is comprised of a light chain variable region (VL) and a light chain constant region. The light chain constant region is comprised of one domain, CL. The VH and VL regions can be further subdivided into regions of hypervariability, called complementarity determining regions (CDR), interspersed with regions that are more conserved, called framework regions (FR). Each VH and VL is composed of three CDRs and four FRs, arranged from amino-terminus to carboxy-terminus in the following order: FR1, CDR1, FR2, CDR2, FR3, CDR3, FR4.

[0046] CDRs and FRs may be defined according to Kabat (Sequences of Proteins of Immunological Interest (National Institutes of Health, Bethesda, Md., 1987 and 1991)). Amino acid numbering of antibodies or antigen binding fragments is also according to that of Kabat.

[0047] Each CDR can included amino acid residues from a complementarity determining region as defined by Kabat (i.e. about residues 24-34 (CDR-L1), 50-56 (CDR-L2) and 89-97 (CDR-L3) in the light chain variable domain (SEQ ID NO:1) and 31-35 (CDR-H1), 50-65 (CDR-H2) and 95-102 (CDR-H3) in the heavy chain variable domain (SEQ ID NO:2); Kabat et al., Sequences of Proteins of Immunological Interest, 5th Ed. Public Health Service, National Institutes of Health, Bethesda, Md. (1991)) and/or those residues from a hypervariable loop (i.e. about residues 26-32 (CDR-L1), 50-52 (CDR-L2) and 91-96 (CDR-L3) in the light chain variable domain (SEQ ID NO:1) and 26-32 (CDR-H1), 53-55 (CDR-H2) and 96-101 (CDR-H3) in the heavy chain variable domain (SEQ ID NO:2); Chothia and Lesk J. Mol. Biol. 196:901-917 (1987)). In some instances, a complementarity determining region can include amino acids from both a CDR region defined according to Kabat and a hypervariable loop.

[0048] Framework regions are those variable domain residues other than the CDR residues. Each variable domain typically has four FRs identified as FR1, FR2, FR3 and FR4. If the CDRs are defined according to Kabat, the light chain FR residues are positioned at about residues 1-23 (LCFR1), 35-49 (LCFR2), 57-88 (LCFR3), and 98-107 (LCFR4) of SEQ ID NO:1) and the heavy chain FR residues are positioned about at residues 1-30 (HCFR1), 36-49 (HCFR2), 66-94 (HCFR3), and 103-113 (HCFR4) of SEQ ID NO:2. If the CDRs comprise amino acid residues from hypervariable loops, the light chain FR residues are positioned about at residues 1-25 (LCFR1), 33-49 (LCFR2), 53-90 (LCFR3), and 97-107 (LCFR4) in the light chain (SEQ ID NO:1) and the heavy chain FR residues are positioned about at residues 1-25 (HCFR1), 33-52 (HCFR2), 56-95 (HCFR3), and 102-113 (HCFR4) in the heavy chain (SEQ ID NO:2). In some instances, when the CDR comprises amino acids from both a CDR as defined by Kabat and those of a hypervariable loop, the FR residues will be adjusted accordingly.

[0049] An Fv fragment is an antibody fragment which contains a complete antigen recognition and binding site. This region consists of a dimer of one heavy and one light chain variable domain in tight association, which can be covalent in nature, for example in scFv. It is in this configuration that the three CDRs of each variable domain interact to define an antigen binding site on the surface of the VH-VL dimer. Collectively, the six CDRs or a subset thereof confer antigen binding specificity to the antibody. However, even a single variable domain (or half of an Fv comprising only three CDRs specific for an antigen) has the ability to recognize and bind antigen, although usually at a lower affinity than the entire binding site.

[0050] The Fab fragment contains a variable and constant domain of the light chain and a variable domain and the first constant domain (CH1) of the heavy chain. F(ab′)2 antibody fragments comprise a pair of Fab fragments which are generally covalently linked near their carboxy termini by hinge cysteines between them. Other chemical couplings of antibody fragments are also known in the art.

[0051] Single-chain Fv or (scFv) antibody fragments comprise the VH and VL domains of antibody, wherein these domains are present in a single polypeptide chain. Generally the Fv polypeptide further comprises a polypeptide linker between the VH and VL domains, which enables the scFv to form the desired structure for antigen binding.

[0052] Diabodies are small antibody fragments with two antigen-binding sites, which fragments comprise a heavy chain variable domain (VH) connected to a light chain variable domain (VL) in the same polypeptide chain (VH and VL). By using a linker that is too short to allow pairing between the two domains on the same chain, the domains are forced to pair with the complementary domains of another chain and create two antigen-binding sites.).

[0053] Linear antibodies comprise a pair of tandem Fd segments (VH-CH1-VH-CH1) which, together with complementary light chain polypeptides, form a pair of antigen binding regions. Linear antibodies can be bispecific or monospecific.

[0054] The antibodies herein specifically include chimeric antibodies (immunoglobulins) in which a portion of the heavy and/or light chain is identical with or homologous to corresponding sequences in antibodies derived from a particular species or belonging to a particular antibody class or subclass, while the remainder of the chain(s) is identical with or homologous to corresponding sequences in antibodies derived from another species or belonging to another antibody class or subclass, as well as fragments of such antibodies, so long as they exhibit the desired biological activity.

[0055] An antigen binding portion of an antibody specifically binds to an antigen (e.g., H1N1). It has been shown that the antigen-binding function of an antibody can be performed by portions of a full-length antibody, all of which are encompassed by the general term antibody, including: (i) a Fab fragment, a monovalent fragment consisting of the VL, VH, CL and CH1 domains; (ii) a F(ab′)2 fragment, a bivalent fragment comprising two Fab fragments linked by a disulfide bridge at the hinge region; (iii) a Fd fragment consisting of the VH and CH1 domains; (iv) a Fv fragment consisting of the VL and VH domains of a single arm of an antibody, (v) a dAb fragment (Ward et al, (1989) Nature 341:544 546), which consists of a VH domain; and (vi) an isolated complementarity determining region (CDR). Furthermore, although the two domains of the Fv fragment, VL and VH, are coded for by separate genes, they can be joined, using recombinant methods, by a synthetic linker that enables them to be made as a single protein chain in which the VL and VH regions pair to form monovalent molecules (known as single chain Fv (scFv); see e.g., Bird et al. (1988) Science 242:423 426; and Huston et al. (1988) Proc. Natl. Acad. Sci. USA 85:5879 5883). Single chain Fv and other forms of single chain antibodies, such as diabodies are also encompassed by the general term antibody. Diabodies are bivalent, bispecific antibodies in which VH and VL domains are expressed on a single polypeptide chain, but using a linker that is too short to allow for pairing between the two domains on the same chain, thereby forcing the domains to pair with complementary domains of another chain and creating two antigen binding sites (see e.g., Holliger et al. (1993) Proc. Natl. Acad. Sci. USA 90:6444; Poljak et al. (1994) Structure 2:1121).

[0056] An antibody or antigen-binding portion thereof may be part of a larger immunoadhesion molecule, formed by covalent or noncovalent association of the antibody or antibody portion with one or more other proteins or peptides. Examples of such immunoadhesion molecules include use of the streptavidin core region to make a tetrameric scFv molecule (Kipriyanov et al. (1995) Human Antibodies and Hybridomas 6:93) and use of a cysteine residue, a marker peptide and a C-terminal polyhistidine tag to make bivalent and biotinylated scFv molecules (Kipriyanov et al. (1994) Mol. Immunol. 31:1047). Antibody portions, such as Fab and F(ab)₂ fragments, can be prepared from whole antibodies using conventional techniques, such as papain or pepsin digestion, respectively, of whole antibodies. Moreover, antibodies, antibody portions and immunoadhesion molecules can be obtained using standard recombinant DNA techniques.

[0057] Human antibodies include antibodies having variable and constant regions derived from (or having the same amino acid sequence as those derived from) human germline immunoglobulin sequences. Human antibodies may include amino acid residues not encoded by human germline immunoglobulin sequences (e.g., mutations introduced by random or site-specific mutagenesis in vitro or by somatic mutation in vivo), for example in the CDRs and in particular CDR3.

[0058] Recombinant antibodies are prepared, expressed, created or isolated by recombinant means, such as antibodies expressed using a recombinant expression vector transfected into a host cell, antibodies isolated from a recombinant, combinatorial human antibody library, antibodies isolated from an animal (e.g., a mouse) that is transgenic for human immunoglobulin genes (Taylor et al. (1992) Nucl. Acids Res. 20:6287) or antibodies prepared, expressed, created or isolated by any other means that involves splicing of human immunoglobulin gene sequences or variants thereof to other DNA sequences. Such recombinant human antibodies have variable and constant regions derived from human germline immunoglobulin sequences or variants thereof. In certain embodiments, however, such recombinant human antibodies are subjected to in vitro mutagenesis (or, when an animal transgenic for human Ig sequences is used, in vivo somatic mutagenesis) and thus the amino acid sequences of the VH and VL regions of the recombinant antibodies are sequences that may not naturally exist within the human antibody germline repertoire in vivo.

[0059] In certain embodiments, the anti-influenza antibodies are isolated and/or purified and/or pyrogen free antibodies. The term “purified” as used herein, refers to other molecules, e.g. polypeptide, nucleic acid molecule that have been identified and separated and/or recovered from a component of its natural environment. Thus, in one embodiment the antibodies of the invention are purified antibodies wherein they have been separated from one or more components of their natural environment.

[0060] The anti-influenza antibodies of the invention immunospecifically bind an epitope specific to an HA domain of an H1N1 influenza virus and do not specifically bind to other polypeptides. The term “epitope” as used herein refers to a protein determinant capable of binding to an antibody. Epitopes usually consist of chemically active surface groupings of molecules such as amino acids or sugar side chains and usually have specific three dimensional structural characteristics, as well as specific charge characteristics. Conformational and non-conformational epitopes are distinguished in that the binding to the former but not the latter is lost in the presence of denaturing solvents.

[0061] The present anti-influenza antibodies comprise at least one antigen binding domain that comprises at least one complementarity determining region (CDR1, CDR2 and CDR3). In one embodiment, the anti-influenza antibodies comprise a VH that comprises at least one VH CDR (e.g., CDR-H1, CDR-H2 or CDR-H3). In another embodiment, the anti-influenza antibodies comprise a VL that comprises at least one VL CDR (e.g., CDR-L1, CDR-L2 or CDR-L3).

[0062] In certain embodiments, the anti-influenza antibodies comprise a VH CDR1 having an amino acid sequence identical to or comprising 1, 2, or 3 amino acid residue substitutions relative to a VH CDR1 in column J of Table 2 or Table 5, a VH CDR2 having an amino acid sequence identical to or comprising 1, 2, or 3 amino acid residue substitutions relative to a VH CDR2 in column L of Table 2 or Table 5 and a VH CDR3 having an amino acid sequence identical to or comprising 1, 2, or 3 amino acid residue substitutions relative to a VH CDR3 in column N of Table 2 or Table 5. In another embodiment, the anti-influenza antibodies comprise a VL CDR1 having an amino acid sequence identical to or comprising 1, 2, or 3 amino acid residue substitutions relative to a VL CDR1 in column J of Table 2 or Table 5, a VL CDR2 having an amino acid sequence identical to or comprising 1, 2, or 3 amino acid residue substitutions relative to a VL CDR2 in column L of Table 2 or Table 5, and a VL CDR3 having an amino acid sequence identical to or comprising 1, 2, or 3 amino acid residue substitutions relative to a VL CDR3 in column N of Table 2 or Table 5.

[0063] In certain embodiments, the anti-influenza antibodies comprise a VH CDR1 having an amino acid sequence identical to a VH CDR1 in column J of Table 2 or Table 5, a VH CDR2 having an amino acid sequence identical to a VH CDR2 in column L of Table 2 or Table 5 and a VH CDR3 having an amino acid sequence identical to a VH CDR3 in column N of Table 2 or Table 5. In another embodiment, the anti-influenza antibodies comprise a VL CDR1 having an amino acid sequence identical to a VL CDR1 in column J of Table 2 or Table 5, a VL CDR2 having an amino acid sequence identical to a VL CDR2 in column L of Table 2 or Table 5; and a VL CDR3 having an amino acid sequence identical to a VL CDR3 in column N of Table 2 or Table 5. In certain embodiments the VH and VL CDRs are all from the same antibody in Table 2 or Table 5.

[0064] In certain embodiments, the anti-influenza antibodies comprise a heavy chain V-region having an amino acid sequence identical to a heavy chain V-region in column H of Table 2 or Table 5 and a light chain V-region identical to a light chain V-region in column H of Table 2 or Table 5.

[0065] In certain embodiments, the anti-influenza antibodies comprise a heavy chain V-region having an amino acid sequence identical to or having 1, 2, 3, 4, 5, 6, 7, 8, 9 or 10 amino acid substitution relative to a heavy chain V-region in column H of Table 2 or Table 5 and a light chain V-region having an amino acid sequence identical to or having 1, 2, 3, 4, 5, 6, 7, 8, 9 or 10 amino acid substitution relative to a light chain V-region in column H of Table 2 or Table 5

[0066] In certain embodiments, the anti-influenza antibodies comprise a heavy chain VDJ-region having an amino acid sequence identical to a heavy chain VDJ-region in column F of Table 2 or Table 5 and a light chain VJ-region identical to a light chain VJ-region in column G of Table 2 or Table 5

[0067] In certain embodiments, the anti-influenza antibodies comprise a heavy chain VDJ-region having an amino acid sequence identical to or having 1, 2, 3, 4, 5, 6, 7, 8, 9 or 10 amino acid substitution relative to a heavy chain VDJ-region in column F of Table 2 or Table 5 and a light chain VJ-region having an amino acid sequence identical to or having 1, 2, 3, 4, 5, 6, 7, 8, 9 or 10 amino acid substitution relative to a light chain VJ-region in column G of Table 2 or Table 5.

[0068] In addition to the amino acid sequences described above, the invention further provides nucleotide sequences corresponding to the amino acid sequences and encoding for the human, humanized and/or chimeric antibodies of the invention. In one embodiment, the invention provides polynucleotides comprising a nucleotide sequence encoding an anti-influenza antibody described herein or fragments thereof. These include, but are not limited to, nucleotide sequences that code for the above referenced amino acid sequences. Thus, the present invention also provides polynucleotide sequences encoding VH and VL framework regions including CDRs and FRs of antibodies described herein as well as expression vectors for their efficient expression in cells (e.g. mammalian cells).

[0069] In one embodiment, the anti-influenza antibodies immunospecifically bind an HA domain of an H1N1 influenza virus or antigenic fragments thereof, having at least 60%, 65%, 70%, 75%, 80%, 85%, 90%, 95% or having at least 100% identity to the amino acid sequence of an antibody described herein. In a further embodiment, the anti-influenza antibodies immunospecifically bind to an HA domain of an H1N1 influenza virus polypeptide or antigenic fragments thereof, having at least 90%, 91%, 92%, 93%, 94%, 95%, 96%, 97%, 98%, 99% or having at least 100% identity to the amino acid sequence of an antibody described herein.

[0070] Methods for producing and screening for specific antibodies using recombinant DNA technology are routine and well known in the art (e.g. U.S. Pat. No. 4,816,567). DNA encoding the monoclonal antibodies may be readily isolated and/or sequenced using conventional procedures (e.g., by using oligonucleotide probes that are capable of binding specifically to genes encoding the heavy and light chains of murine antibodies). Once isolated, the DNA may be placed into expression vectors, which are then transfected into host cells such as E. coli cells, simian COS cells, Chinese Hamster Ovary (CHO) cells, or myeloma cells that do not otherwise produce antibody protein, to obtain the synthesis of monoclonal antibodies in the recombinant host cells. Review articles on recombinant expression in bacteria of DNA encoding the antibody include Skerra et al., Curr. Opinion in Immunol., 5:256-262 (1993) and Pluckthun, Immunol. Revs., 130:151-188 (1992). As described below for antibodies generated by phage display and humanization of antibodies, DNA or genetic material for recombinant antibodies can be obtained from source(s) other than hybridomas to generate antibodies of the invention.

[0071] Recombinant expression of an antibody or variant thereof generally requires construction of an expression vector containing a polynucleotide that encodes the antibody. The invention, thus, provides replicable vectors comprising a nucleotide sequence encoding an antibody molecule, a heavy or light chain of an antibody, a heavy or light chain variable domain of an antibody or a portion thereof, or a heavy or light chain CDR, operably linked to a promoter. Such vectors may include the nucleotide sequence encoding the constant region of the antibody molecule (see, e.g., U.S. Pat. Nos. 5,981,216; 5,591,639; 5,658,759 and 5,122,464) and the variable domain of the antibody may be cloned into such a vector for expression of the entire heavy, the entire light chain, or both the entire heavy and light chains.

[0072] Once the expression vector is transferred to a host cell by conventional techniques, the transfected cells are then cultured by conventional techniques to produce an antibody. Thus, the invention includes host cells containing a polynucleotide encoding an antibody of the invention or fragments thereof, or a heavy or light chain thereof, or portion thereof, or a single-chain antibody of the invention, operably linked to a heterologous promoter. In certain embodiments for the expression of double-chained antibodies, vectors encoding both the heavy and light chains may be co-expressed in the host cell for expression of the entire immunoglobulin molecule, as detailed below.

[0073] Mammalian cell lines available as hosts for expression of recombinant antibodies are well known in the art and include many immortalized cell lines available from the American Type Culture Collection (ATCC), including but not limited to Chinese hamster ovary (CHO) cells, HeLa cells, baby hamster kidney (BHK) cells, monkey kidney cells (COS), human hepatocellular carcinoma cells (e.g., Hep G2), human epithelial kidney 293 cells, and a number of other cell lines. Different host cells have characteristic and specific mechanisms for the post-translational processing and modification of proteins and gene products. Appropriate cell lines or host systems can be chosen to ensure the correct modification and processing of the antibody or portion thereof expressed. To this end, eukaryotic host cells which possess the cellular machinery for proper processing of the primary transcript, glycosylation, and phosphorylation of the gene product may be used. Such mammalian host cells include but are not limited to CHO, VERY, BHK, Hela, COS, MDCK, 293, 3T3, W138, BT483, Hs578T, HTB2, BT2O and T47D, NS0 (a murine myeloma cell line that does not endogenously produce any functional immunoglobulin chains), SP20, CRL7O3O and HsS78Bst cells. In one embodiment, human cell lines developed by immortalizing human lymphocytes can be used to recombinantly produce monoclonal antibodies. In one embodiment, the human cell line PER.C6. (Crucell, Netherlands) can be used to recombinantly produce monoclonal antibodies.

[0074] Additional cell lines which may be used as hosts for expression of recombinant antibodies include, but are not limited to, insect cells (e.g. Sf21/5f9, Trichoplusia ni Bti-Tn5b1-4) or yeast cells (e.g. S. cerevisiae, Pichia, U.S. Pat. No. 7,326,681; etc), plants cells (US20080066200); and chicken cells (WO2008142124).

[0075] Once an antibody molecule has been produced by recombinant or hybridoma expression, it may be purified by any method known in the art for purification of an immunoglobulin molecule, for example, by chromatography (e.g., ion exchange, affinity, particularly by affinity for the specific antigens Protein A or Protein G, and sizing column chromatography), centrifugation, differential solubility, or by any other standard technique for the purification of proteins. Further, the antibodies of the present invention or fragments thereof may be fused to heterologous polypeptide sequences (referred to herein as “tags”) described above or otherwise known in the art to facilitate purification.

[0076] It is known that variants of the Fc region (e.g., amino acid substitutions and/or additions and/or deletions) enhance or diminish effector function of the antibody (See e.g., U.S. Pat. Nos. 5,624,821; 5,885,573; 6,538,124; 7,317,091; 5,648,260; 6,538,124; WO 03/074679; WO 04/029207; WO 04/099249; WO 99/58572; US Publication No. 2006/0134105; 2004/0132101; 2006/0008883) and may alter the pharmacokinetic properties (e.g. half-life) of the antibody (see, U.S. Pat. Nos. 6,277,375 and 7,083,784). Thus, in certain embodiments, the anti-influenza antibodies of the invention comprise an altered Fc region (also referred to herein as “variant Fc region”) in which one or more alterations have been made in the Fc region in order to change functional and/or pharmacokinetic properties of the antibodies. The serum half-life of proteins comprising Fc regions may be increased by increasing the binding affinity of the Fc region for FcRn. The term “antibody half-life” as used herein means a pharmacokinetic property of an antibody that is a measure of the mean survival time of antibody molecules following their administration. Antibody half-life can be expressed as the time required to eliminate 50 percent of a known quantity of immunoglobulin from the patient's body (or other mammal) or a specific compartment thereof, for example, as measured in serum, i.e., circulating half-life, or in other tissues. Half-life may vary from one immunoglobulin or class of immunoglobulin to another. In general, an increase in antibody half-life results in an increase in mean residence time (MRT) in circulation for the antibody administered. In a specific embodiment, the present invention provides an Fc variant antibody, wherein the Fc region comprises at least one non-naturally occurring amino acid at one or more positions selected from the group consisting of 252, 254, and 256. In one embodiment, the non-naturally occurring amino acids are selected from the group consisting of 252Y, 254T and 256E.

[0077] In certain embodiments, the anti-influenza antibodies and compositions thereof of the invention may be used in vivo and/or in vitro for diagnosing H1N1 influenza associated diseases. This can be achieved, for example, by contacting a sample to be tested, optionally along with a control sample, with the antibody under conditions that allow for formation of a complex between the antibody and H1N1 influenza. Complex formation is then detected (e.g., using an ELISA). When using a control sample along with the test sample, complex is detected in both samples and any statistically significant difference in the formation of complexes between the samples is indicative of the presence of influenza in the test sample.

[0078] In one embodiment, the invention provides a method of determining the presence of influenza in a sample suspected of containing influenza, said method comprising exposing the sample to an anti-influenza antibody of the invention, and determining binding of the antibody to the H1N1 influenza virus in the sample wherein binding of the antibody to the H1N1 influenza virus in the sample is indicative of the presence of the H1N1 influenza virus in the sample. In one embodiment, the sample is a biological sample. In another embodiment, the sample is a nasopharyngeal wash.

[0079] In certain embodiments, the anti-influenza antibodies and compositions thereof of the invention may be administered for prevention and/or treatment of influenza disease caused by an H1N1 influenza infection. The invention encompasses methods of preventing, treating, ameliorating a symptom of, or reducing the risk of an influenza-mediated infection, disease or disorder, wherein the methods comprise administering anti-influenza antibodies of the invention.

### EXAMPLES

[0080] Described below is an analysis of plasmablast and monoclonal antibody responses induced by pandemic H1N1 infection in humans. Unlike antibodies elicited by annual influenza vaccinations, most neutralizing antibodies induced by pandemic H1N1 infection were broadly cross-reactive against epitopes in the hemagglutinin (HA) stalk and head domain of multiple influenza strains. The antibodies were from cells that had undergone extensive affinity maturation. Thus, it is possible that the plasmablasts producing these broadly neutralizing antibodies were predominantly derived from activated memory B cells specific for epitopes conserved in several influenza strains. Consequentially, most neutralizing antibodies were broadly reactive against divergent H1N1 and H5N1 influenza strains. Certain of the antibodies generated potently protected and rescued mice from lethal challenge with pandemic H1N1 or antigenically distinct influenza strains.

Influenza-Specific Plasmablasts are Persistently Induced Throughout Infection Providing a Rich Source of Antiviral mAbs.

[0081] The B cell responses were examined in nine patients infected with the pandemic 2009 H1N1 influenza virus. These patients had a varying course and severity of disease. The cases ranged from mild disease with rapid viral clearance within a few days after onset of symptoms, to severe cases that shed virus for several weeks and required hospitalization with ventilator support. A majority of the patients were treated with antiviral drugs. The diagnoses were confirmed by pandemic H1N1 specific RT-PCR and serology. All patients had neutralizing titers of serum antibodies at the time of blood collection. A summary of the clinical patient data is shown in Table 1. The majority of samples were obtained around 10 days after the onset of symptoms, with the exception of a particularly severe case where sampling was done 31 days after symptom onset. Antigen specific plasmablasts appear transiently in peripheral blood after vaccination with influenza or other vaccines (Bernasconi et al., 2002; Brokstad et al., 1995; Sasaki et al., 2007; Wrammert et al., 2008), but the kinetics of their appearance and persistence during an ongoing infection remain unclear. Here we have analyzed the magnitude and specificity of the plasmablast response in blood samples taken within weeks after onset of clinical symptoms of pandemic H1N1 influenza virus infection. Using a virus-specific ELISPOT assay, we could show a significant number of pandemic H1N1 reactive plasmablasts in the blood of the infected patients, while none were detectable in a cohort of healthy volunteers (FIGS. 1A and 1B).

[0082] These cells were also readily detectable in the more severe cases, several weeks after symptom onset. FIGS. 1A and 1C illustrates that of the total IgG secreting cells over half of the cells were producing antibodies that bound pandemic H1N1 influenza virus. Moreover, plasmablasts specific for HA occurred at 30-50% the frequency of virus-specific cells (FIGS. 1C and D), the specificity most likely to be critical for protection. Most patients also had a relatively high frequency of plasmablasts making antibodies that bound to past, seasonal influenza strains (FIG. 1C) orindeed recombinant HA from the previous annual H1N1 strain, A/Brisbane/59/2007. Based on the overall frequency of pandemic H1N1 specific cells it is likely that the cells binding other strains were-lapping populations and cross-reactive. None of the induced plasmablast cells bound to recombinant HA from the H3N2 strain from the same vaccine (A/Brisbane/10/2007). These findings demonstrate that influenza-specific human plasmablasts are continuously generated throughout an ongoing infection and that a fairly high proportion of these cells makes antibodies that also cross-react with previous annual H1N1 influenza strains.

[0083] In order to analyze the specificity, breadth and neutralizing capacity of these plasmablasts, we used single-cell PCR to amplify the heavy and light chain variable region genes from individually sorted cells (defined as CD19⁺, CD20^{lo/-}, CD3⁻, CD38^{high}, CD27^{high} cells) (FIG. 1E) (Smith et al., 2009; Wrammert et al., 2008). These genes were cloned and expressed as mAbs in 293 cells and the antibodies screened for reactivity by ELISA. Thresholds for scoring antibodies as specific to the influenza antigens were empirically determined based on being two standard-deviations greater than the background level of binding evident from 48 naïve B cell antibodies (detailed in FIG. 7A). Of 86 antibodies generated in this fashion, 46 (53%) bound pandemic H1N1 (FIG. 1F) and one third (15 antibodies) were reactive to HA (FIG. 1G and FIG. 8A), most of them at sub-nanomolar avidities (based on surface

TABLE I
Summary of clinical data for patients with acute pandemic H1N1 virus infections

| | | | HAI | MN | Co- | | | Sample | Antiviral | |
|---|---|---|---|---|---|---|---|---|---|---|
| Patient | Age | Gender | titer | titer | morbidities | Initial symptoms | Hospital course | collection | treatment | mAb |
| E M | 30 | F | 640 | 1280 | none | Fever, cough, dyspnea | Acute respiratory distress | Day 31 | Oseltamivir | Yes |
| | | | | | | | syndrome, bacterial pneumonia, | | | |
| | | | | | | | pulmonary embolism, prolonged | | | |
| | | | | | | | oscillatory ventilator support, | | | |
| | | | | | | | tracheostomy, discharged after | | | |
| | | | | | | | 2 mo | | | |
| 1000 | 37 | M | 80 | 40 | Hypertension, | Fever, cough, shortness | Pneumonia, acute sinusitus, | Day 18 | Oseltamivir, | Yes |
| | | | | | interstitial | of breadth, nausea, | acute renal failure, discharged | | Zanamavir | |
| | | | | | lung disease | vomiting | after 8 d | | | |
| | | | | | of unknown | | | | | |
| | | | | | etiology | | | | | |
| 70 | 38 | F | 80 | 160 | none | Fever, cough, body aches | N/A | Day 15 | None | Yes |
| 1009 | 21 | M | 20 | 20 | Congenital | Fever, cough, sore throat, | N/A | Day 9 | Oseltamivir | Yes |
| | | | | | heart disease, | nausea, diarrhea | | | | |
| | | | | | repair for | | | | | |
| | | | | | Tetralogy of | | | | | |
| | | | | | Fallot | | | | | |
| 1010 | 24 | M | 10 | 10 | none | Fever, cough, nausea, | N/A | Day 11 | Oseltamivir | No |
| | | | | | | vomiting, diarrhea | | | | |
| 1011 | 25 | M | 20 | 10 | none | Fever, cough, sore throat, | N/A | Day 9 | Oseltamivir | No |
| | | | | | | vomiting, headache, | | | | |
| | | | | | | confusion | | | | |
| 1013 | 26 | M | 80 | 160 | none | Fever, cough, sore throat, | N/A | Day 9 | None | No |
| | | | | | | body aches, nausea, | | | | |
| | | | | | | vomiting, diarrhea | | | | |
| 1014 | 45 | F | 80 | 20 | none | Fever, chills, cough, | N/A | Day 9 | None | No |
| | | | | | | sore throat, body aches, | | | | |
| | | | | | | headache, nausea, | | | | |
| | | | | | | vomiting | | | | |

¹Indicates whether monoclonal antibodies were made from the plasmoblasts of these patients.

plasmon resonance analyses, FIG. 8B). On a per donor basis, 55% of the mAbs bound to purified pandemic H1N1 virions (range: 33% to 77%). Of the virus-specific antibodies 31% bound to recombinant HA (range: 14% to 55%). We conclude that virus-specific plasmablasts are readily detected after pandemic H1N1 influenza virus infection and that virus-specific human mAbs can be efficiently generated from these cells.
Plasmablasts from Patients Infected with Pandemic H1N1 Influenza were Highly Cross-Reactive to Pre-Pandemic Influenza Strains

[0084] As the plasmablasts are specifically induced by the ongoing immune response, we can learn about the origin of the B cells activated by pandemic H1N1 infection. Consistent with the frequency of plasmablasts secreting antibodies binding annual influenza strains by ELISPOT analyses (FIG. 1C), a majority (29/46 or 63%) of the pandemic H1N1-specific antibodies also cross-reacted with seasonal influenza viruses (FIGS. 2A and 2B). In fact, by ELISA, one third of these antibodies bind to the pre-pandemic strains at lower concentrations than they did to the pandemic H1N1 strain, suggesting higher avidity binding. By comparison, only 22% (11/50) of plasmablasts induced by annual H1N1 strains prior to the pandemic could bind the pandemic H1N1 influenza (FIG. 7B). We propose that the cross-reactivity of pandemic H1N1 induced cells derives from the activation of memory cells originally specific for past influenza immunizations in an original antigenic sin(OAS) fashion.

### Evidence of Extensive Affinity Maturation Suggests a High Frequency of Memory Cell Activation Against the Pandemic H1N1 Strain

[0085] Based on the 10 to 15-fold induction of plasmablasts and expression of intracellular Ki67 during ongoing immune responses (Bernasconi et al., 2002; Brokstad et al., 1995; Sasaki et al., 2007; Smith et al., 2009; Wrammert et al., 2008) we can assume that most plasmblasts result from the ongoing infection or vaccine response. The ready detection of clonal expansions at an average frequency of 16.5% of the cells for the six patients supports this view (based on CDR3 sequence similarity, FIG. 2C). Since the discovery of somatic mutation it has been appreciated that mutations progressively accumulate on variable genes after repeated immunizations (McKean et al., 1984). Thus, we can gain insight into the origin of the pandemic H1N1 response by comparing the somatic mutation frequency of the plasmablasts present during H1N1 infection to that of other plasmablast responses. The PCR strategy allowed isolation of either IgG or IgA transcripts and identified 68% IgG and 32% IgA plasmablasts from the patients. Similar to plasmablasts induced by annual vaccination (Wrammert et al., 2008), or after a 4^{th} booster vaccine to anthrax, the variable genes of novel H1N1-induced cells from five of the six patients harbored high numbers of somatic mutations (averaging >19 per patient, FIG. 2D and FIG. 9A). For these 5 patients mutations had accumulated significantly more than from primary IgG plasmablast responses to anthrax or vaccinia (small pox) vaccines, and more so than for IgG positive memory B cells from our historical data that averaged 14/VH gene (Koelsch et al., 2007; Wrammert et al., 2008; Zheng et al., 2005; Zheng et al., 2004) (t-test p<0.05, FIG. 2C and FIG. 9B) or from 347 IgG memory cell sequences previously published by another group (averaging 15/VH gene) (de Wildt et al., 2000). Interestingly, for patient EM (outlier in FIG. 2D) who had the most severe infection (Table 1), mutations had accumulated at a significantly lower frequency than the IgG controls (FIG. 9A, p<0.0001), suggesting a unique circumstance such as a low-level or lacking primary response. Though based on a limited number of patients, the frequent cross-reactivity and high number of somatic mutations support a model in which many of the plasmablasts induced by pandemic H1N1 infection arose from cross-reacting memory B cells.

### A Majority of the Neutralizing Antibodies Bound to Highly Conserved Epitopes in Both the HA Stalk and Head Regions.

[0086] A high frequency of the HA-specific antibodies was able to neutralize the virus in vitro (totaling 73% or 11/15, FIG. 3A). These neutralizing antibodies could be further categorized into two distinct groups: i) neutralizing antibodies that displayed HAI (hemagglutination inhibition) activity (HAI), and ii) neutralizing antibodies that had no HAI activity, indicating that they bound to sites other than the HA active site. Interestingly, antibodies of the latter type were predominant in the response (FIG. 3A). This specificity is reminiscent of antibodies against the recently discovered broadly neutralizing epitopes found on the HA stalk, rather than those located on the HA globular head that is more typical for neutralizing antibodies (Ekiert et al., 2009; Sui et al., 2009). Importantly, five of these antibodies are indeed of similar specificity (including antibodies 70-5B03, 70-1F02, 1000-3D04, and a clonal pair from donor 1009: 3B05 and 3E06). These five antibodies bind with high affinity to most H1 strains including all from the vaccines of the past 10 years, the 1918 pandemic strain, and to the H5 of a highly pathogenic avian influenza strain (FIG. 3B and FIG. 8A). In addition, these five antibodies cross-compete for a similar epitope that was not over-lapping with the HAI⁺ antibodies (epitope-1, FIG. 4A). These antibodies are competitively inhibited by a commercial antibody referred to as C179 that binds this HA-stalk region (Okuno et al., 1993), and four of five of these antibodies are encoded by the hallmark VH1-69 gene (Ekiert et al., 2009; Sui et al., 2009). To verify HA stalk reactivity these five antibodies were tested for binding to H5 variants predicted to affect the stalk-epitope by the crystal structure and their binding patterns compared to that of the prototypical stalk antibody (mAb F10, (Sui et al., 2009)) (FIG. 4B). Each H5 variant has a single residue mutation in the stalk region and was transiently expressed on 293T cells. FACS analysis showed that the five antibodies bound to all 13 H5 variants tested at levels quite similar to F10 for which a crystal structure had been generated to define this epitope. Thus, half of the neutralizing and a surprising 10% of all antibodies induced by pandemic H1N1 infection bound to a conserved, critical epitope on the HA stalk. By comparison, none of 50 H1N1 strain-specific antibodies that we had previously isolated after annual vaccination prior to the 2009 pandemic had this reactivity (data not shown). The frequency of pandemic induced stem reactive antibodies (5/46) versus those from annual vaccine (0/50) is significantly greater (Chi-square test p=0.02). Further, this specificity is only rarely seen in human memory B cells (Corti et al., 2010) or from phage-display libraries (Sui et al., 2009). These observations support the idea that a vaccine might be developed that preferentially influenzas the HA-stalk, thus providing broad protection against many influenza strains.

[0087] The remaining neutralizing antibodies were HAI⁺ and therefore bound to the HA-globular head. Based on cross-competition analyses these antibodies fell into two groups binding non-overlapping regions of the HA head including epitope-2 and epitope-3 (FIGS. 3B and 4A). Indeed, by spontaneous escape mutant selection, we found that the EM4C04 mAb binds to the Sa region of the HA globular head (unpublished data). Thus by proximity based on the competition assay (FIG. 4A), we can predict that all of the epitope-2 antibodies bind near the Sa/Sb region (including: EM-4C04, 1009-3B06, and 1009-3F01).

[0088] Broadly-reactive antibodies binding both pandemic H1N1 strains and common annual H1N1 strains have been identified both in humans (Krause et al.; Xu et al.) and in mice (Manicassamy et al., 2010). It is notable that three of five of the HA globular-head binding antibodies induced by pandemic H1N1 infection were also broadly-reactive to various H1N1 strains (FIG. 3B). One such novel antibody was the SF1009-3B06 antibody that reacts strongly with the pandemic H1N1 strain as well as all recent H1N1 vaccine strains (FIG. 3B and FIG. 8A). The precise epitope to which the 1009-3B06 antibody binds appears to be quite unique: it is only accessible on whole virions, not on recombinant HA, suggesting that the epitope is quaternary in nature. Finally, two antibodies cross-reacted and inhibited hemagglutination to all recent H1 vaccine strains and reacted strongly to the 1918 pandemic strain (antibodies 1009-3E04 and 1000-3E01, FIGS. 3B and 4A epitope-3). These mAbs bind to past vaccine strains with higher avidity than to the pandemic H1N1.

[0089] Only two of 11 neutralizing antibodies were highly specific for the pandemic H1N1 strain alone (FIG. 3B and FIG. 8A), including a low avidity antibody, 1000-2G06, that only showed slight neutralization capacity in vitro, and EM-4C04 that was very effective at neutralizing the pandemic H1N1 influenza. We conclude from these experiments that a surprising 82% (9/11) of the neutralizing plasmablasts that we isolated during pandemic H1N1 influenza infections were broadly cross-reactive to multiple influenza strains.

Potent In Vivo Protection and Rescue of Mice Challenged with a Lethal Dose of Pandemic H1N1 or Antigenically Distinct Influenza Virus Strains.

[0090] There is a distinct interest in the world in developing monoclonal antibodies for use in a therapeutic setting. We selected three representative antibodies of the set we have identified for detailed functional analysis both in vitro (FIG. 3C) and in vivo (FIGS. 5 and 6), including: EM-4C04, 1009-3B06 and 70-1F02. As described above, the antibodies EM-4C04 and 1009-3B06 are specific for the active site of the HA molecule, whereas 70-1F02 binds to the stalk region. Furthermore, EM-4C04 is highly specific for pandemic H1N1 whereas 1009-3B06 and 70-F02 display broadly cross-reactive binding (FIG. 3B) and have functional activity against multiple recent and older H1N1 strains (FIG. 3C). These antibodies were all highly effective at providing prophylactic protection against infection with a lethal dose of mouse-adapted pandemic H1N1 in 6-8 week old Balb/c mice (FIG. 5). Moreover, all three antibodies were effective therapeutically, even when they were administered as late as 60 hours after the lethal challenge infection, well after the mice were symptomatic. For EM-4C04 we have successfully treated mice as far out as 72 hours post-infection (data not shown). Infected mice were already showing measurable weight loss that was reversed by administration of the antibody, demonstrating therapeutic potential even after the onset of disease. Viral clearance was analyzed in mice treated at 48 hours post infection with EM4C04 (FIG. 10). As early as day 4, the antibody-treated mice exhibited more than a log reduction in viral titers; titers continued to decline, such that by day 6, virus was undetectable or present at very low levels. The untreated mice perished by day 7 or 8 whereas the treated mice cleared the infection with no detectable virus on day 12. Finally, the two broadly-reactive antibodies, 1009-3B06 and 70-1F02 that showed activity against several current and older H1N1 seasonal influenza strains in vitro (FIG. 3C) were also tested in vivo against antigenically distinct influenza strains. For these experiments mice were treated with 200 ug of mAb intraperitoneally 12 hours prior to infection with a lethal dose of either pandemic H1N1 influenza or either of the two common influenza lab strains PR/8/34 or FM/1/47. 1009-3B06 and 70-1F02 showed protection against these antigenically distinct H1N1 influenza strains, as illustrated in FIG. 5. EM-4C04, that is highly specific for the pandemic H1N1, had no protective effect on infection with PR/8/34 or FM/1/47. In conclusion, the antibodies characterized herein show promise for development as broadly reactive therapeutic agents against the pandemic H1N1 influenza virus as well as against the majority of H1N1 and H5N1 influenza strains.

Detailed Information Regarding Antibodies that Bind Influenza Virus

[0091] Table 2 (FIG. 11) provides detailed information, including sequence information, about each of the antibodies that were confirmed to bind influenza. Each antibody is identified in Col. A by antibody name and an indication of whether the heavy or light chain is being described. Heavy chains are indicated by H1, H2 or H3 and light chains are indicated by K1, K2, K3 or K4 at the end of the identifier in Col. A. Thus, line 2 of Table 2 describes 1000-1B02H, which is a heavy chain for one of the cloned antibodies, and line 3 of Table 2 describes 1000-1B02K2, which is the light chain for the same antibody. Col. B indicates whether the clone was productive; Col. C provides the V gene and V gene allele; Col. E provides the J gene and J allele. Col. E provides the D gene and allele (for heavy chains). Col. F provides the V-D-J region amino acid sequence (for heavy chains). Col. G provides the V-J region amino acid sequence (for light chains). Col. H provides the V-region amino acid sequence. Col. I provides the FR1 amino acid sequence. Col. J provides the CDR1 amino acid sequence. Col. K provides the FR2 amino acid sequence. Col. L provides the CDR2 amino acid sequence. Col. M provides the FR3 amino acid sequence. Col. N provides the CDR3 amino acid sequence. Col. O provides the junction amino acid sequence. Col. P provides the J-region amino acid sequence. Col. Q provides the FR4 amino acid sequence.

[0092] Table 3 (FIG. 12) provides additional information about the antibodies in Table 3 (FIG. 11). Columns A-C are as in Table 2. Column D is the V-region score; column E is the V-region % identity; column F is the V-region % identify at the nucleotide level; column G is the J-gene and allele; column I is the J-region % identity; column J is the J-region % identify at the nucleotide level; column K is the D-gene and allele; column L is the D-region reading frame; column M is the CDR1-imgt length; column N is the CDR2-imgt length; column O is the CDR3-imgt length; column P is the CDR-imgt lengths; column Q is the FR-imgt length; column R is the AA junction; column S indicates the frame of the junction; column T indicates the orientation; column U has functionality comments; column V has information regarding the potential for V-region inserts or deletions; column W has comments on the J-gene and allele; and column X provides the nucleotide sequence.

[0093] Table 4 (FIG. 13) provides additional information about the antibodies in Table 3 (FIG. 11). Columns A-E are as in Table 2. Col. F provides the V-D-J region nucleotides (heavy chains). Col. G provides the V-J region nucleotide sequence (for light chains). Col. H provides the V-region nucleotide sequence. Col. I provides the FR1 nucleotide sequence. Col. J provides the CDR1 nucleotide sequence. Col. K provides the FR2 nucleotide sequence. Col. L provides the CDR2 nucleotide sequence. Col. M provides the FR3 nucleotide sequence. Col. N provides the CDR3 nucleotide sequence. Col. O provides the junction nucleotide sequence. Col. P provides the 3′ V-region nucleotide sequence. Col. Q provides the N and D region nucleotide sequence. Column R provides the P 3′V nucleotide sequence. Column S provides the N-region nucleotide sequence. Column T provides the N1-region nucleotide sequence. Column U provides the P 5′D nucleotide sequence. Column V provides the D-region nucleotide sequence. Column W provides the P 3′D-region nucleotide sequence. Column X provides the N2-region nucleotide sequence. Column Y provides the P 5′ J nucleotide sequence. Column Z provides the 5′J-region nucleotide sequence. Column AA provides the D-J-region nucleotide sequence. Column AB provides the J-region nucleotide sequence. Column AC provides the FR3 nucleotide sequence.

### Detailed Information Regarding Antibodies not Tested for Binding to Influenza Virus

[0094] FIG. 14 (Table 5) provides detailed information, including sequence information, about each of the antibodies that were not tested for binding influenza. Certain of these antibodies may bind influenza. Each antibody is identified in Col. A by antibody name and an indication of whether the heavy or light chain is being described. Heavy chains are indicated by H1, H2 or H3 and light chains are indicated by K1, K2, K3 or K4 at the end of the identifier in Col. A. Col. B indicates whether the clone was productive; Col. C provides the V gene and V gene allele; Col. E provides the J gene and J allele. Col. E provides the D gene and allele (for heavy chains). Col. F provides the V-D-J region amino acid sequence (for heavy chains). Col. G provides the V-J region amino acid sequence (for light chains). Col. H provides the V-region amino acid sequence. Col. I provides the FR1 amino acid sequence. Col. J provides the CDR1 amino acid sequence. Col. K provides the FR2 amino acid sequence. Col. L provides the CDR2 amino acid sequence. Col. M provides the FR3 amino acid sequence. Col. N provides the CDR3 amino acid sequence. Col. O provides the junction amino acid sequence. Col. P provides the J-region amino acid sequence. Col. Q provides the FR4 amino acid sequence.

[0095] FIG. 15 (Table 6) provides additional information about the antibodies in Table 5 (FIG. 14). Columns A-C are as in Table 5. Column D is the V-region score; column E is the V-region % identity; column F is the V-region % identify at the nucleotide level; column G is the J-gene and allele; column I is the J-region % identity; column J is the J-region % identify at the nucleotide level; column K is the D-gene and allele; column L is the D-region reading frame; column M is the CDR1-imgt length; column N is the CDR2-imgt length; column O is the CDR3-imgt length; column P is the CDR-imgt lengths; column Q is the FR-imgt length; column R is the AA junction; column S indicates the frame of the junction; column T indicates the orientation; column U has functionality comments; column V has information regarding the potential for V-region inserts or deletions; column W has comments on the J-gene and allele; and column X provides the nucleotide sequence.

[0096] FIG. 16 (Table 7) provides additional information about the antibodies in Table 5 (FIG. 14). Columns A-E are as in Table 5. Col. F provides the V-D-J region nucleotide sequence (heavy chains). Col. G provides the V-J region nucleotide sequence (for light chains). Col. H provides the V-region nucleotide sequence. Col. I provides the FR1 nucleotide sequence. Col. J provides the CDR1 nucleotide sequence. Col. K provides the FR2 nucleotide sequence. Col. L provides the CDR2 nucleotide sequence. Col. M provides the FR3 nucleotide sequence. Col. N provides the CDR3 nucleotide sequence. Col. O provides the junction nucleotide sequence. Col. P provides the 3′ V-region nucleotide sequence. Col. Q provides the N and D region nucleotide sequence. Column R provides the P 3′V nucleotide sequence. Column S provides the N-region nucleotide sequence. Column T provides the N1-region nucleotide sequence. Column U provides the P 5′D nucleotide sequence. Column V provides the D-region nucleotide sequence. Column W provides the P 3′D-region nucleotide sequence. Column X provides the N2-region nucleotide sequence. Column Y provides the P 5′ J nucleotide sequence. Column Z provides the 5′J-region nucleotide sequence. Column AA provides the D-J-region nucleotide sequence. Column AB provides the J-region nucleotide sequence. Column AC provides the FR3 nucleotide sequence.

[0097] The following techniques and materials were used in the studies described above.

[0098] Patients:

[0099] All studies were approved by the Emory University, University of Chicago and Columbia University institutional review boards (Emory IRB#22371 and 555-2000, U of C IRB#16851E, CU IRB#AAAE1819). Patient clinical information is detailed in Table 1.

[0100] PBMC and Plasma Isolation:

[0101] All work with samples from infected patients was performed in a designated BSL2+ facility at Emory University. Peripheral blood mononuclear cells (PBMC) were isolated using Vacutainer tubes (Becton Dickinson, BD), washed, and resuspended in PBS with 2% FCS for immediate use or frozen for subsequent analysis. Plasma samples were saved in −80 C.

[0102] Viruses and Antigens:

[0103] The pandemic H1N1 influenza virus (A/California/04/2009) was kindly provided by Dr. Richard J Webby at St. Jude Childrens Hospital. Influenza virus stocks used for the assays were freshly grown in eggs, prepared and purified as described (Wrammert et al., 2008) and the hemagglutination activity (HA) was determined using turkey red blood cells (Lampire Biological Laboratories, Pipersville, Pa.) as previously described (Wrammert et al., 2008) or purchased as inactivated preparations (ProSpec-Tany TechnoGene Ltd., Rehovot, Israel) and included: A/California/04/09 (H1N1), A/FM/1/47 (H1N1), A/PR8/34 (H1N1), A/New Calcdonia/20/99 (H1N1), A/Solomon Island/3/06, A/Brisbane/59/07 (H1N1), A/Brisbane/10/07 (H3N2). Vaccines tested included the 2006/7 vaccine from Chiron Vaccines Limited (Liverpool, UK) and the 2008/9 formulation from Sanofi Pasteur Inc. (Swiftwater, Pa.). Recombinant HA proteins were provided by the influenza reagent resource (IRR; influenza reagent resource.org) of the CDC (recombinant HA from A/California/04/2009 (H1N1) (#FR-180), A/Brisbane/10/2007 (H1N1) (#FR-61), A/Brisbane/59/2007 (H3N2) (#FR-65)) or by Biodefense & Emerging Infections research repository (BEI; www.beiresources.org (recombinant HA from A/Indonesia/05/2005 (H5N1). A/Brevig Mission/1/1918 (H1N1) was purchased from SinoBiologicals.

[0104] ELISPOT Assay:

[0105] Direct ELISPOT to enumerate the number of either total IgG secreting, pandemic H1N1 influenza specific or vaccine specific ASC present in the PBMC samples were essentially done as previously described (Crotty et al., 2003). Briefly, 96-well ELISPOT filter plates (Millipore, MAHA N4510) were coated overnight with either the optimized amounts of purified pandemic H1N1 virions, recombinant HA from the pandemic H1N1 (as above), the 08/09 influenza vaccine at a dilution of 1/20 in PBS or with goat anti-human Ig (Caltag). Plates were washed and blocked by incubation with RPMI containing 10% FCS at 37° C. for 2 hrs. Purified and extensively washed PBMCs or sorted ASCs were added to the plates in dilution series and incubated for 6 hrs. Plates were washed with PBS followed by PBS containing 0.05% Tween and then incubated with a biotinylated anti-huIgG (gamma) antibody (Caltag) and incubated for 1.5 hrs at room temperature. After washing, the plates were incubated with an avidin-D-HRP conjugate (Vector Laboratories) and finally developed using AEC substrate (3 amino-9 ethyl-carbozole, Sigma). Developed plates were scanned and analyzed using an automated ELISPOT counter (Cellular Technologies Ltd.).

[0106] Flow Cytometry Analysis and Cell Sorting:

[0107] Analytical flow cytometry analysis was performed on whole blood following lysis of erythrocytes and fixing in 2% PFA. All live cell sorting and single cell sorting was performed on purified PBMCs using either a FACSVantage or ARIAII cell sorter system. All antibodies for both analytical and cell sorting cytometry were purchased from Pharmingen, except anti-CD27 that was purchased from eBiosciences. Anti-CD3-PECy7 or PerCP, anti-CD20-PECy7 or PerCP, anti-CD38-PE, anti-CD27-APC and anti-CD19-FITC. ASCs were gated and isolated as CD19⁺CD3⁻ CD20^{lo/-}CD27^{high}CD38^{high} cells. Flow cytometry data was analyzed using FlowJo software.

[0108] Generation of mAbs:

[0109] Identification of antibody variable region genes were done essentially as previously described (Smith et al., 2009; Wardemann et al., 2003; Wrammert et al., 2008). Briefly, single ASCs were sorted into 96-well PCR plates containing RNase inhibitor (Promega). VH and Vκ genes from each cell were amplified by RT-PCR and nested PCR reactions using cocktails of primers specific for both IgG and IgA using primer sets detailed in (Smith et al., 2009) and then sequenced. To generate recombinant antibodies, restriction sites were incorporated by PCR with primers to the particular variable and junctional genes. VH or Vκ genes amplified from each single cell were cloned into IgG1 or Igκ expression vectors as previously described (Smith et al., 2009; Wardemann et al., 2003; Wrammert et al., 2008). Antibody sequences are deposited on Genebank (Accession numbers: HQ689701-HQ689792). Heavy/light chain plasmids were co-transfected into the 293A cell line for expression and antibodies purified with protein A sepharose. Antibody proteins generated in this study can be provided in limited quantities upon request.

[0110] Mutational Analysis:

[0111] Antibody anti-H1N1 induced plasmablast variable genes were amplified by single cell RT-PCR using primer sets and PCR conditions that were previously published (Smith et al., 2009; Wrammert et al., 2008). Variable genes were determined using in house analysis software compared to the Immunogentics V gene data set and the IMGT search engine (Ehrenmann et al., 2010; Lefranc et al., 2009). Background mutation rates by this method is approximately 1 base-exchange per 1,000 bases sequenced (based on sequences of constant region gene segments). Comparisons were made to historical data some of which was previously published (Duty et al., 2009; Wrammert et al., 2008; Zheng et al., 2005).

[0112] Plaque Assay and PRNT₅₀ Assay:

[0113] MDCK cells were grown in 6-well plates at a density of 8×10⁵/well. On the next day, cells were washed with PBS. Ten fold dilutions of virus were added in 500 ul DMEM and incubated at 37 C for 1 hour with mixing every 10 minutes. Cells were washed with PBS and overlayed with 199 media containing 0.5% agarose (Seakem), 1× antibiotics (100 U/ml penicillin, 100 mg/ml streptomycin), 0.2% BSA (Sigma-Aldrich) and 0.5 ug/ml TPCK-Trypsin (Sigma-Aldrich). Cells were incubated for 36-40 hrs and fixed with 2% PFA for 10 minutes. Agarose plugs were removed and cells were stained with 0.1% crystal violet in 25% EtOH for 1 min. After removal the crystal violet solution, plates were dried and used to count plaques in each well. For PRNT₅₀ assay, MDCK cells were prepared as above. On the next day, mAbs were 3 fold-diluted (60 to 0.74 ug/ml). 100 PFU of virus in 250 ul DMEM were incubated with equal volume of diluted mAbs at 37 C for 1 hour prior to the plaque assay as described above. Plaques were counted and the final concentration of antibodies that reduced plaques to below 50 PFU were scored as PRNT₅₀.

[0114] Determination of 50% Tissue Culture Infectious Dose (TCID50) and Microneutralization:

[0115] To determine the TCID₅₀, MDCK cells were grown in 96-well plate at a density of 1.5×10⁴/well. On the next day, cells were washed with PBS and 10 fold-diluted viruses in 100 ul DMEM were added into each well and incubated at 37 C for 1 hour. After the incubation, cells were washed with PBS and 100 ul of DMEM containing 1× antibiotics (100 U/ml penicillin, 100 mg/ml streptomycin), 0.5% BSA (Sigma-Aldrich) and 0.5 ug/ml TPCK-Trypsin (Sigma-Aldrich) were added. Cells were further incubated for 60 hrs and 50 ul of the supernatant was incubated with equal volume of 0.5% of PBS-washed Turkey red blood cells (Rockland Immunochemicals) for 30 min. Four replicates were performed for each dilution and complete agglutination was scored as HA positive. Virus titers were calculated by Reed-Muench method. For microneutralization assay, 100 TCID₅₀ of virus in 50 ul DMEM were incubated with 50 ul of 3 fold-diluted antibodies (60 to 0.082 ug/ml) at 37 C for 1 hour. Cells were washed and incubated in the media as described above for 60 hrs. The microneutralization titer was determined as the final concentration of mAbs that completely inhibited infection.

[0116] HAI and ELISA Assays:

[0117] Whole virus, recombinant HA or vaccine-specific ELISA was performed on starting concentrations of 10 ug/ml of virus or recombinant HA and on 1:20 dilution of the vaccine as previously described (Wrammert et al., 2008). Briefly, microtiter plates were coated with live virus strains totaling 8 HAU of total virus per well or with 1 ug/ml of recombinant HA protein. In order to standardize the various ELISA assays common high affinity antibodies with similar affinities and binding characteristics against each virus strain were included on each plate and the plate developed when the absorbance of these controls reach 3.0±0.1 OD units. Goat anti-human IgG (Goat anti-human I-peroxidase-conjugate (Jackson ImmunoResearch, West Grove, Pa.) was used to detect binding of the recombinant antibodies followed by development with horseradish peroxidase substrate (BioRad, Hercules, Calif.). Absorbencies were measured at OD415 on a microplate reader (Molecular Devices, Sunnyvale, Calif.). Affinity estimates were calculated by nonlinear regression analysis of curves from 8 dilutions of antibody (10 to 0.125 ug/ml) using GraphPad Prism. The hemagglutination inhibition (HAI) titers were determined as previously described (Wrammert et al., 2008). Briefly, The samples were then serially diluted with PBS in 96 well v-bottom plates and 8 HAU (as determined by incubation with 0.5% turkey RBCs in the absence of serum) of live egg-grown virus was added to the well. After 30 minutes at room temperature, 50 ul of 0.5% turkey RBCs (Rockland Immunochemicals) suspended in PBS with 0.5% BSA was added to each well and the plates were shaken manually. After an additional 30 minutes at room temperature, the serum titers or minimum effective concentrations were read based on the final dilution for which a button was observed.

[0118] Competition ELISA:

[0119] Competition ELISA was performed by inhibiting binding of each biotinylated antibody (NHS-coupled, Thermo Scientific) at the half-maximal binding concentration with a 10-fold molar excess of purified antibody. All comparisons of different antibodies were based on percentage absorbance values for each antibody against itself (which was scored as 100% inhibition). Detection was using streptavidin-HRP as described above for ELISA.

[0120] FACS Analysis of Binding of Anti-HA Antibodies with H5 and it's Mutants as Previously Described (Sui et al., 2009):

[0121] The full length HA gene (H5-TH04) of A/Thailand/2(SP-33)/2004 (H5N1) were codon-optimized for eukaryotic cell expression and cloned into pcDNA3.1 vector to obtain the pcDNA3.1-H5-TH04 construct (Sui et al., 2009). All mutants of H5-TH04 were derived from pcDNA3.1-H5-TH04 and constructed by the QuikChange method (Stratagene, La Jolla, Calif.). The full-length wild type H5-TH04 and mutants expressing plasmids were transfected transiently into 293T cells with Lipofectamine 2000 (Invitrogen Life Science). 24 h after transfection, cells were harvested for immunostaining Anti-HA antibodies, or a control human mAb 80R (Sui et al., 2004) at 10 μg/mL or ferret anti-H5N1 serum at 1:300 dilution were incubated with transfected 293T cells at 4° C. for 1 h. Cells were then washed three times with PBS containing 0.5% BSA and 0.02% NaN₃. FITC-labeled goat anti-human IgG (Pierce Biotech., Rockford, Ill.) or FITC-labeled goat anti-ferret IgG (Bethyl, Montgomery, Tex.) were then added to cells and incubated for 30 minutes at 4° C. Cells were washed as above, and binding of antibodies to cells was analyzed using a Becton Dickinson FACScalibur with CellQuest software.

[0122] BIACORE Analysis:

[0123] The kinetic interactions of the mAbs with recombinant A/Cal/04/09 (H1N1) HA protein were determined by surface plasmon resonance (SPR) using a BIAcore3000 instrument. EM4CO4 and SF1009-3F01 antibodies were immobilized at 10 ulmin⁻¹ on a CMS sensor chip by amine coupling and recombinant HA at concentrations ranging from 0.5 nM to 15 nM in HBS-EP buffer were injected at 20 ulmin⁻¹ over the immobilized antibodies or reference cell surface. Running buffer (HBS-EP) was then applied for 600s after which the sensor surface was regenerated by a single injection of 25 mM NaOH at 100 ulmin⁻¹. For the other experiments, recombinant HA (His-tagged) was immobilized at 5 ulmin⁻¹ on NTA sensor chips with a influenza density of 350 response units and the antibodies at concentrations ranging from 1 nM to 30 nM in HBS-P buffer were injected at 20 ulmin⁻¹ over the immobilized recombinant HA or reference cell surface, followed by a 600s dissociation phase. All experiments were performed in triplicates. For kinetic analysis, injections over reference cell surface and injections with buffer were subtracted from the data. Association rates (kₐ), dissociation rates (k_{d}) and equilibrium dissociation constants (K_{D}) were calculated by aligning the curves to fit a 1:1 binding model using BIAevaluation 4.1 software. Antibodies 1009-3B06, 1000-3E01, and 1000-2G06 could not be determined because these mAbs did not bind to the recombinant HA protein from baculovirus sufficiently well for SPR. Avidities for these mAbs and for the antibodies that did not neutralize infection in vitro were estimated by Scatchard plot analyses of ELISA data (shown in parentheses).

[0124] In Vivo Protection Experiments:

[0125] Female Balb/c mice 6-8 weeks old were used for the challenge studies. Mice were inoculated intra-nasally with 3×LD50 of a highly pathogenic, mouse-adapted pandemic H1N1 influenza virus (A/California/04/09), or PR/8/34 or FM/1/47 influenza virus. The mouse adapted pandemic H1N1 virus had been serially passaged in mice for five generations prior to use herein. The LD50 for all the viruses was determined by in vivo infection at various virus concentrations, according to the method of Reed and Muench. The experiments were conducted in accordance with ethical procedures and policies approved by the Emory University's Institutional Animal Care and Use Committee. In order to determine the prophylactic efficacy of the mAb, mice were treated intraperitoneally with 200 ug (10 mg/kg of body weight) of the specific mAbs. Twelve hours later mice were challenged with 3×LD50 of one of the mouse adapted influenza viruses used in the study. All mice were monitored daily for any signs of morbidity and mortality. Body weight changes were registered daily for a period of 14 days. All mice that lost more than 25% of their initial body weight were sacrificed according to the IACUC guideless. In order to determine the therapeutic efficacy of the mAbs, mice were challenged with 3×LD50 of the mouse-adapted pandemic H1N1 virus. At various times post infection (12, 24, 36, 48, 60 and 72 hours) mice were treated intraperitoneally with 200□g (10 mg/kg of body weight) of the specific mAbs. All mice were monitored daily and the body weight changes were registered daily as described above.

[0126] Statistical Analysis:

[0127] Data was collected and graphed using MS Excel and Graphpad Prism software. Efficacy of the therapeutic and challenge experiments was evaluated by ANOVA using Graphpad Prism software.

### Discussion

[0128] Our findings provide insight into the human B cell responses to a pandemic influenza virus strain. The unique genetic composition of the pandemic H1N1 influenza virus meant that our relatively young cohort probably had little or no pre-existing specific antibody mediated immunity to this virus prior to infection (Brockwell-Staats et al., 2009; Dawood et al., 2009; Garten et al., 2009; Hancock et al., 2009). Thus, two sources of B cells could have contributed to this response: newly recruited naïve B cells, and pre-existing memory B cells that bound to epitopes conserved between past seasonal strains and the pandemic H1N1 strain. We theorize that predominant activation of the latter, pre-existing memory cells, can account for the observed high frequency of neutralizing antibodies (11/15 HA-binding antibodies), the majority (9/11) of which are cross-reactive with seasonal H1N1 strains (FIG. 3C) and other group 1 influenza strains, including H5 HA. A number of observations support this conjecture.

[0129] Most convincingly, there was a particularly high frequency of cross-reactive antibodies overall, with a high level of somatic mutations found particularly amongst the variable genes of cross-reacting cells (FIG. 2 and FIG. 9). In fact, by ELISA most antibodies were cross-reactive and one third of the antibodies bound to past annual viral antigens at lower concentrations, suggesting higher avidity to past influenza strains than to the current pandemic H1N1 virus. Further, cross-reacting cells that bind with higher affinity to the pandemic H1N1 strain also have the highest frequency of variable-gene mutations (FIG. 9B). Antibodies that were broadly cross-reactive were amongst the more highly mutated clones (FIG. 9B). We propose that many of these cells were specific for cross-reactive epitopes present in annual influenza strains that then underwent further affinity maturation and adaptation to the infecting pandemic H1N1 virus. Supporting this conjecture, Corti et al. first demonstrated that naturally occurring HA-stalk reactive memory B cells could be isolated from the blood of people recently immunized with the annual vaccine, prior to the outbreak of pandemic H1N1 (Corti et al., 2010). The nature of that study was to screen EBV-transformed memory cell lines, thus precluding the determination of precise frequencies of these stalk-reactive B cells. However, these antibodies were estimated to be quite rare; occurring at 1 in thousands to 1 in hundreds of influenza-binding B cells, varying by individual. In contrast we show that plasmablasts activated by infection with the highly novel pandemic H1N1 influenza strain have substantially increased influenzaing to the HA-stalk region epitopes, totaling 10% of all influenza specific antibodies and half of the neutralizing antibodies (FIG. 4). In fact most specific antibodies isolated in this study were cross-reactive to past influenza strains. Collectively, the data described supports a model in which divergent viruses that are conserved only at the most critical regions for function will elicit a higher proportion of cross-reactive and neutralizing antibodies. Thus although the activated plasmablasts of relatively few patients could be analyzed in detail at the monoclonal antibody level, we proffer that with the proper immunogen, the long-sought development of a pan-influenza vaccine might be possible.

[0130] Interestingly, the highly specific antibody EM-4C04 was derived from a patient that had a very severe disease course, with persistent viral shedding over several weeks. In addition, the variable genes from the plasmablasts of this patient had the lowest average number of somatic mutations (FIG. 2B, outlier, and FIG. 9B). Taken together the unique specificity against pandemic H1N1, the low levels of somatic mutation, and the unusually severe disease in the absence of pre-disposing conditions suggest that this patient may have mounted a primary immune response to the pandemic H1N1 influenza infection. The complete lack of pre-existing immunity may have contributed to the more severe disease observed in this patient. In contrast, the activation of broadly cross-neutralizing memory B cells in those with immune experience to annual strains might have contributed to the less severe disease of most infected patients during the pandemic.

[0131] It is notable that there is a discrepancy between patients for serum MN titers, the severity of disease, and the frequency of plasmablasts expressing neutralizing antibodies (Table 1 and FIG. 3). For example, patient EM described above, despite having the worst disease course, had the greatest HAI and MN serum titers. This may be due to either the time from infection (day 31), allowing full seroconversion, or due to the presence of highly potent antibodies such as EM-4C04 whose activity was less likely to titer out. The highly specific nature of the response from this patient may have contributed to this advantage, ultimately better influenzaing the epitopes of the pandemic H1N1 strain. In contrast, patient 1009 had relatively low HAI and MN serum titers but the highest frequency of broadly neutralizing antibodies and a less severe disease course. One possibility is that our sampling from this patient was done prior to peak serological responses. Another possibility is that the high frequency of these potent antibodies in the memory B cell compartment may have resulted in rapid resolution of infection, precluding the development of a high serological response. A third possibility is that despite broader protection, the stalk-reactive antibodies are on the whole less potent and more rapidly titrated out then the highly specific antibodies to the HA-globular head. These various possibilities will be of significant interest to study in the future.

[0132] Finally, we report the development of a large panel of human mAbs induced by pandemic H1N1 infection. Prophylactic therapy with polyclonal or mAbs has successfully been used for RSV, rabies, Hepatitis A and B and varicella. In the case of influenza, mAbs have been shown to provide prophylactic or therapeutic protection in mice and other animal models (Palladino et al., 1995; Renegar et al., 2004; Reuman et al., 1983; Sweet et al., 1987). Also passive transfer of maternal antibodies in humans has been shown to confer protection (Puck et al., 1980). Several of the antibodies we isolated have broad neutralization capacity in vitro against divergent influenza strains and show potent prophylactic and therapeutic activity when used to treat mice that were lethally infected with influenza. These antibodies could provide much needed pandemic therapeutics to treat severe cases of influenza and to protect high-risk populations.

[0133] In conclusion, analyses of 46 mAbs induced by pandemic H1N1 infection indicated frequent activation of broadly-reactive B cells. We propose that these cells had a memory cell origin due to cross-reactivity to conserved and functionally important epitopes. If true then it will be important to characterize the efficacy of the pandemic H1N1 vaccine to induce a similarly cross-protective response.

1. A purified antibody or antibody fragment, wherein the antibody or the fragment binds to an HA domain of influenza virus and comprises:
(a) a VH CDR1 having an amino acid sequence identical to or comprising 1, 2, or 3 amino acid residue substitutions or deletions relative to a VH CDR1 in column J of Table 2;
(b) a VH CDR2 having an amino acid sequence identical to or comprising 1, 2, or 3 amino acid residue substitutions or deletions relative to a VH CDR2 in column L of Table 2;
(c) a VH CDR3 having an amino acid sequence identical to or comprising 1, 2, or 3 amino acid residue substitutions or deletions relative to a VH CDR3 in column N of Table 2;
(d) a VL CDR1 having an amino acid sequence identical to or comprising 1, 2, or 3 amino acid residue substitutions or deletions relative to a VL CDR1 in column J of Table 2;
(e) a VL CDR2 having an amino acid sequence identical to or comprising 1, 2, or 3 amino acid residue substitutions or deletions relative to a VL CDR2 in column L of Table 2; and
(f) a VL CDR3 having an amino acid sequence identical to or comprising 1, 2, or 3 amino acid residue substitutions or deletions relative to a VL CDR3 in column N of Table 2.

2. (canceled)

3. The isolated antibody or antibody fragment of claim 1 wherein the VH CDR and VL CDR respectively selected from lines 2/3, 4/5, 5/6, 8/9. 10/11, 12/13, 14/15, 16/17, 18/19, 20/21, 22/23, 24/25, 26/27, 28/29, 20/31, 32/33, 34/35, 36/37, 38/39, 40/41, 42/43, 44/45, 46/47, 48/49, 50/51, 52/53, 54/55, 56/57, 58/59, 60/61, 62/63, 64/65, 66/67, 68/69, 70/71, 72/73, 74/75, 76/77, 78/79, 80/81, 82/83, 84/85, 86/87, 88/89, 90/91, and 92/93.

4. The isolated antibody or antibody fragment of claim 1 wherein the VH CDR and VL CDR are those of an antibody selected from the group consisting of: 1009-3D06, 1009-3B05, 70-1F02 and 70-3B03.

5. The isolated antibody of or antibody fragment of claim 1 wherein the influenza is H1N1 or H5N1.

6. (canceled)

7. The isolated antibody or antibody fragment of claim 5 wherein the antibody or antibody fragment binds H1N1 and H5N1.

8. The isolated antibody or antibody fragment of claim 1 wherein the antibody or antibody fragment binds to the HA of two or more strains of H1N1.

9.-10. (canceled)

11. The isolated antibody or antibody fragment of claim 1 wherein the antibody or antibody fragment binds to the HA of two or more strains of H5N1.

12. (canceled)

13. An isolated antibody or antibody fragment, wherein the antibody or the fragment (i) comprises a VH chain domain comprising three CDRs and a VL chain domain comprising three CDRs; and (ii) binds an HA domain of influenza virus wherein the three CDRs of the VH chain domain comprise:
(a) a VH CDR1 comprising the amino acid sequence of a VH CDR1 in column J of Table 2;
(b) a VH CDR2 comprising the amino acid sequence of a VH CDR2 in column L of Table 2; and
(c) a VH CDR3 comprising the amino acid sequence of a VH CDR3 in column N of Table 2.

14. A purified antibody or antibody fragment, wherein the antibody or the fragment (i) comprises a VH chain domain comprising three CDRs and a VL chain domain comprising three CDRs; and (ii) binds an HA domain of influenza virus wherein the three CDRs of the VL chain domain comprise:
(a) a VL CDR1 comprising the amino acid sequence of VL CDR1 in column J of Table 2;
(b) a VL CDR2 comprising the amino acid sequence of a VL CDR2 in column L of Table 2; and
(c) a VL CDR3 comprising the amino acid sequence of a VL CDR3 in column N of Table 2.

15. A purified antibody or antibody fragment, wherein the antibody or the fragment binds the HA domain of an influenza virus and comprises a heavy chain variable domain having an amino acid sequence identical to or comprising up to 10 amino acid residue substitutions relative to the amino acid sequence of the heavy chain variable domain (column H) of a selected antibody in Table 2 and comprises a light chain variable domain having an amino acid sequence identical to or comprising up to 10 amino acid residue substitutions relative to the amino acid sequence of the light chain variable domain (column H) of the selected antibody in Table 2.

16.-17. (canceled)

18. A purified antibody or antibody fragment, wherein the antibody or the fragment binds the same epitope on an HA domain of an influenza virus as that bound by an antibody comprising: (a) a heavy chain variable domain having the amino acid sequence of the heavy chain variable domain sequence (column H) of a selected antibody in Table 2; and (b) a light chain variable domain having the amino acid sequence of the light chain variable domain sequence (column H) of the selected antibody in Table 2.

19. A purified antibody or antibody fragment, wherein the antibody or the fragment binds to an HA domain of influenza virus, comprising:
(a) a polypeptide comprising an amino acid sequence identical to or having up to 5 amino acid substitutions compared to a V-D-J sequence in column F of Table 2; and
(a) a polypeptide comprising an amino acid sequence identical to or having up to 5 amino acid substitutions compared to a V-J sequence in column G of Table 2.

20. (canceled)

21. The purified antibody or antibody fragment of claim 1, wherein the purified antibody or antibody fragment binds an HA stalk.

22-46. (canceled)

The application's sequence listing, which the Patent Office published only in electronic form, follows.

SEQUENCE LISTING (10329 sequences)

SEQ ID NO: 1 - protein, 8 aa, Homo sapiens
GMTSNSLA

SEQ ID NO: 2 - protein, 8 aa, Homo sapiens
IIPVFETP

SEQ ID NO: 3 - protein, 16 aa, Homo sapiens
ATSAGGIVNYYLSFNI

SEQ ID NO: 4 - protein, 97 aa, Homo sapiens
QVQLVQSGAEVKKPGSSVKVSCKASGMTSNSLAISWVRQAPGQGLEWMGGIIPVFETPKYAQKFQGRVTITADKSTNTAYMDLISLKSEDTAMYYCA

SEQ ID NO: 5 - protein, 6 aa, Homo sapiens
QTITTW

SEQ ID NO: 6 - protein, 9 aa, Homo sapiens
QQYSTYSGT

SEQ ID NO: 7 - protein, 94 aa, Homo sapiens
DIQMTQSPSTLSASVGDRVTITCRASQTITTWLAWYQQKPGQAPKLLIHKTSTLETGVPSRFSGSGSGTQFTLTITNLQPDDSATYYCQQYSTY

SEQ ID NO: 8 - protein, 8 aa, Homo sapiens
GGTSNNYP

SEQ ID NO: 9 - protein, 8 aa, Homo sapiens
SIPIFNTP

SEQ ID NO: 10 - protein, 16 aa, Homo sapiens
ATSAGGIVNYFLLFDI

SEQ ID NO: 11 - protein, 97 aa, Homo sapiens
QVQLVQSGAELKKPGSSVKVSCKTSGGTSNNYPISWVRQAPGQGLEWMGGSIPIFNTPKYGKKFQGRVTITSDTSTSTAYMELSSLRSDDTAIYYCA

SEQ ID NO: 12 - protein, 6 aa, Homo sapiens
QSISDW

SEQ ID NO: 13 - protein, 9 aa, Homo sapiens
QHYNTYSGT

SEQ ID NO: 14 - protein, 94 aa, Homo sapiens
DIQMTQSPSTLSASVGDRVTIACRASQSISDWLAWYQQKPGKAPKLLIHKASSLESGVPSRFSGGGSGTEFTLTISSLQADDSATYYCQHYNTY

SEQ ID NO: 15 - protein, 8 aa, Homo sapiens
GGIFRSNA

SEQ ID NO: 16 - protein, 8 aa, Homo sapiens
IIAVFGTA

SEQ ID NO: 17 - protein, 14 aa, Homo sapiens
ARGPYYYGNSHLDF

SEQ ID NO: 18 - protein, 97 aa, Homo sapiens
QVQLVQSGAEVKKPGSSVKVSCRASGGIFRSNAISWVRQAPGQGLEWMGEIIAVFGTANYAQKFQGRVTITADESTSTAYMELSSLRSEDTAVYYCA

SEQ ID NO: 19 - protein, 7 aa, Homo sapiens
QSVSSNY

SEQ ID NO: 20 - protein, 9 aa, Homo sapiens
QQYGTSPRT

SEQ ID NO: 21 - protein, 96 aa, Homo sapiens
EIVLTQSPGTLSLSPGERATLSCRASQSVSSNYLAWYQQKPGQAPRLLIYGASNRATGIPDRFSGSGSGTDFTLAISRLEPEDFAVYYCQQYGTSP

SEQ ID NO: 22 - protein, 125 aa, Homo sapiens
QVQLVQSGAEVKKPGSSVKVSCRASGGTFSSFAVSWVRQAPGQGLEWMGGIIGMFGTTKYAQRFLGRVTITADESTSSAYMELSSLTSEDTAVYYCARPGDYRTIRYYHFFMDVWGKGTTVTVSS

SEQ ID NO: 23 - protein, 98 aa, Homo sapiens
QVQLVQSGAEVKKPGSSVKVSCRASGGTFSSFAVSWVRQAPGQGLEWMGGIIGMFGTTKYAQRFLGRVTITADESTSSAYMELSSLTSEDTAVYYCAR

SEQ ID NO: 24 - protein, 25 aa, Homo sapiens
QVQLVQSGAEVKKPGSSVKVSCRAS

SEQ ID NO: 25 - protein, 8 aa, Homo sapiens
GGTFSSFA

SEQ ID NO: 26 - protein, 17 aa, Homo sapiens
VSWVRQAPGQGLEWMGG

SEQ ID NO: 27 - protein, 8 aa, Homo sapiens
IIGMFGTT

SEQ ID NO: 28 - protein, 38 aa, Homo sapiens
KYAQRFLGRVTITADESTSSAYMELSSLTSEDTAVYYC

SEQ ID NO: 29 - protein, 18 aa, Homo sapiens
ARPGDYRTIRYYHFFMDV

SEQ ID NO: 30 - protein, 20 aa, Homo sapiens
CARPGDYRTIRYYHFFMDVW

SEQ ID NO: 31 - protein, 16 aa, Homo sapiens
FFMDVWGKGTTVTVSS

SEQ ID NO: 32 - protein, 11 aa, Homo sapiens
WGKGTTVTVSS

SEQ ID NO: 33 - DNA, 375 bp, Homo sapiens
caggtgcagctggtgcagtctggggctgaggtgaagaagcctgggtcctccgtgaaggtctcctgcagggcgtctggaggcaccttcagcagctttgctgtcagctgggtgcgacaggcccctggacaaggacttgaatggatgggagggatcatcggtatgtttgggacaacaaaatacgcacagaggttcctgggcagagtcacgattaccgcggacgagtctacgagctcagcctacatggagctgagcagcctgacatctgaggacacggccgtgtattattgtgcgagaccgggtgattatcgaaccattagatactatcacttcttcatggacgtctggggcaaagggaccacggtcaccgtctcctca

SEQ ID NO: 34 - DNA, 294 bp, Homo sapiens
caggtgcagctggtgcagtctggggctgaggtgaagaagcctgggtcctccgtgaaggtctcctgcagggcgtctggaggcaccttcagcagctttgctgtcagctgggtgcgacaggcccctggacaaggacttgaatggatgggagggatcatcggtatgtttgggacaacaaaatacgcacagaggttcctgggcagagtcacgattaccgcggacgagtctacgagctcagcctacatggagctgagcagcctgacatctgaggacacggccgtgtattattgtgcgaga

SEQ ID NO: 35 - DNA, 75 bp, Homo sapiens
caggtgcagctggtgcagtctggggctgaggtgaagaagcctgggtcctccgtgaaggtctcctgcagggcgtct

SEQ ID NO: 36 - DNA, 24 bp, Homo sapiens
ggaggcaccttcagcagctttgct

SEQ ID NO: 37 - DNA, 51 bp, Homo sapiens
gtcagctgggtgcgacaggcccctggacaaggacttgaatggatgggaggg

SEQ ID NO: 38 - DNA, 24 bp, Homo sapiens
atcatcggtatgtttgggacaaca

SEQ ID NO: 39 - DNA, 114 bp, Homo sapiens
aaatacgcacagaggttcctgggcagagtcacgattaccgcggacgagtctacgagctcagcctacatggagctgagcagcctgacatctgaggacacggccgtgtattattgt

SEQ ID NO: 40 - DNA, 54 bp, Homo sapiens
gcgagaccgggtgattatcgaaccattagatactatcacttcttcatggacgtc

SEQ ID NO: 41 - DNA, 60 bp, Homo sapiens
tgtgcgagaccgggtgattatcgaaccattagatactatcacttcttcatggacgtctgg

SEQ ID NO: 42 - DNA, 81 bp, Homo sapiens
ccgggtgattatcgaaccattagatactatcacttcttcatggacgtctggggcaaagggaccacggtcaccgtctcctca

SEQ ID NO: 43 - DNA, 31 bp, Homo sapiens
ccgggtgattatcgaaccattagatactatc

SEQ ID NO: 44 - DNA, 14 bp, Homo sapiens
gtgattatcgaacc

SEQ ID NO: 45 - DNA, 13 bp, Homo sapiens
attagatactatc

SEQ ID NO: 46 - DNA, 20 bp, Homo sapiens
acttcttcatggacgtctgg

SEQ ID NO: 47 - DNA, 77 bp, Homo sapiens
gtgattatcgaaccattagatactatcacttcttcatggacgtctggggcaaagggaccacggtcaccgtctcctca

SEQ ID NO: 48 - DNA, 50 bp, Homo sapiens
acttcttcatggacgtctggggcaaagggaccacggtcaccgtctcctca

SEQ ID NO: 49 - DNA, 33 bp, Homo sapiens
tggggcaaagggaccacggtcaccgtctcctca

SEQ ID NO: 50 - protein, 121 aa, Homo sapiens
EVQLVESGGGLVKPGGSLRLSCTASGFNFNNHGMNWLRQAPGKGLEWVASISSGSRSHFYADSLEGRFTVSRDNAKNSLFLQMNSLRAEDTAVYYCARDRYADSNYYFDSWGPGTLVTVSS

SEQ ID NO: 51 - protein, 125 aa, Homo sapiens
EVQLVESGGGLVKPEGSLRLSCEASGFIIDTYSMNWVRQAPGKGLEWVSTISSTSNYIYYADSVKGRFTISRDNAKNSVFLQMNSLRVEDTAIYYCVRDNSGYYENYHYYGMDVWGKGTTVTVSS

SEQ ID NO: 52 - protein, 122 aa, Homo sapiens
QVQLVESGGGVVQPGRSLRLSCAASGFTFSNFGMYWVRQAPGKGLDWVAVISYDGSNTYYADSVKGRFTISRDNSKNTLSLQLNSLKPVDTAVYYCAKAGLQRFSPHFMDVWGTGTTVTVSS

SEQ ID NO: 53 - protein, 118 aa, Homo sapiens
VQLVESGGGLVEPGGSLRLSCAASGFTFSDYQMSWIRQAPGKGLEWLSDITSTGNAKYHADSVKGRFTVSRDNAKRSLYLQMNSLRAEDTAVYFCVRDLVWVQLPDYWGQGTLVTVSS

SEQ ID NO: 54 - protein, 117 aa, Homo sapiens
EVQLVESGGGWVQPGGSLRLSCEASGFTFSLFWMGWVRQAPGKGLEWVATMKQDGSEYYYVDSVKGRFTISRDNPKNSLYLQMNSLRAEDTAVYYCARDFDRGAEHWGQGTLVTVSS

SEQ ID NO: 55 - protein, 126 aa, Homo sapiens
QVQLVESGGGLVKPGGSLRLSCAASGFTFSGYYMSWVRQAPGKGLEWVSYISHRGNMIHYQDSMKGRFIISRDNANNSLYLQMNSLRAEDTAVYYCARYYLAGNCRTSNCYVFDYWGRGTLVTVSS

SEQ ID NO: 56 - protein, 128 aa, Homo sapiens
EVQLLESGGGLVQPGGSLRLSCAASGLNFISYAMSWVRQAPGRGLEWVSVVSGTGGTTFYGDSVQGRFTISRDNSKNMLYLQMDSLRAEDTAKYFCAKHVTGYYLSGGEGGGGTLDVWGKGTTVTVSS

SEQ ID NO: 57 - protein, 114 aa, Homo sapiens
EVQLLESGGDLVQPGGSLRLSCVVSGYTFDYSAMNWVRQAPGKGLEWVSTIFGADAHTYYADAVKGRFTISRDRSKNTLYLQMSSLRAEDTAVYYCVKDQWDYWGQGTLVTVSS

SEQ ID NO: 58 - protein, 120 aa, Homo sapiens
QVQLQESGPGLVKPSGTLSLTCAVSGVSISMINWWTWVRQPPGKGLEWIGEIYHNGSTTYNPSLKTRVTIAIDKSKNQFSLELNSVTAADTAIYYCVAVAFRAYALFDDWGQGALVTVSS

SEQ ID NO: 59 - protein, 124 aa, Homo sapiens
EVQLVQSGVEVKKPGESLKISCKGSGYSFTNYWIGWVRQVPGKGLEWMGSIYSGGSTTIYSPSFQGQVTISADKSNSTAYLQWRSLKASDTAMYYCARHQVSAGYTGYYHFDYWGQGTLVTVSS

SEQ ID NO: 60 - protein, 121 aa, Homo sapiens
QVQLQESGPGLVKPSGTLSLTCAVSGASISSTNWWSWVRQPPGKGLEWIGEIYHNGSTNYNPSLKSRVTISVDKSKNQFSLRLSSVTAADTAVYYCARERNRVYYYGMDVWGKGTTVTVSS

SEQ ID NO: 61 - protein, 121 aa, Homo sapiens
QVQLVQSGSELKKPGASVKVSCKASGYTFTTYSMNWVRQAPGQGLEWMGWINTYTGNPTYAQAFTGRFVFSLDTSVSTAFLQITSLKAEDTAVYYCATRGPVVLGEALAYWGQGALVTVSS

SEQ ID NO: 62 - protein, 121 aa, Homo sapiens
QVQLVQSGSELKKPGASVKVSCKASGYTFTSYAMNWVRQAPGQGLEWMGWINTYTGNPTYAQAFTGRFVFSSDTSASTAYLQINSLKAEDTAVYYCATRGPLVLGEALDSWGQGTLVTVSS

SEQ ID NO: 63 - protein, 123 aa, Homo sapiens
QVQLVQSGSEVKRPGASVQVSCKTSGYTFSDYGMSWVRQAPGQGLEWMGWINVNVGNTNYAQKFQGRVSVTTDTSAGTAYLELRSLTSDDTAVYYCARDEGQYRGNWDHFDYWGQGTLVTVSS

SEQ ID NO: 64 - protein, 124 aa, Homo sapiens
QVQLQQWGAGLLKPSETLSLTCAVYGGSFGGYYWNWIRQPPGKGLEWIGEINHSGSTNYNPSLKSRVTLSVDTSKNQVSLNVSSVTAADTAVYYCARGRGGYATYYYYYYVDVWGKGTTVTVSS

SEQ ID NO: 65 - protein, 122 aa, Homo sapiens
QVQLQESGPGLVKPSQTLSLTCTVSGASINSGGYYWSWIRQHPGKGLEWIGYIYFTGRTNYNPSLKSRVTISIATSKTQFSLKLSSVTAADTAVYYCARDQNDYGEDPLDVWGQGTMVTVSS

SEQ ID NO: 66 - protein, 130 aa, Homo sapiens
QVQLQESGPGLVKPSETLSLTCSVSGGSVSSGIYHWTWIRQPPGKGLEWIGYIYYSGSTYYNPSLKSRVTISLDTSKNHFSLRLSSVTAADTAVYYCARQVFYDNDDHDGLGYYYGLDVWGKGTTVTVSS

SEQ ID NO: 67 - protein, 126 aa, Homo sapiens
QVQLVQSGTEVKKPESSVKVSCEASGGPFGSYAVSWVRQAPGQRLEWIGGIIPIFGTPYYAQKFQGRITITADESTSTAYMELSSLRSDDTAVYYCGRARRQVTLDNSFSYPMDVWGQGTTVTVSS

SEQ ID NO: 68 - protein, 123 aa, Homo sapiens
QVQLVQSGAELKKPGSSVKVSCKTSGGTSNNYPISWVRQAPGQGLEWMGGSIPIFNTPKYGKKFQGRVTITSDTSTSTAYMELSSLRSDDTAIYYCATSAGGIVNYFLLFDIWGQGTMVTVSS

SEQ ID NO: 69 - protein, 127 aa, Homo sapiens
RLQLQESGPGLVKPSETLSLTCTASGGSVNSGGYYWGWIRQPPGKGPEWIGTIYNSGSVDYNPSLKSRVAISIDTFENQFSLKLSSVTAADTAVYYCARVNIYLVTVEEYHYGMDVWGLGTTVTVSS

SEQ ID NO: 70 - protein, 119 aa, Homo sapiens
EVQLVESGGGLVQPGRSLRLSCAASGFTFDDYAMTWVRQAPGKGLEWVSGISWDSGAIGYADSVKGRFTISRDNAKNSLYLQMNSLRTEDTALYFCARSNGAGSYSESWGQGTLVTVSS

SEQ ID NO: 71 - protein, 121 aa, Homo sapiens
QVQLQESGPGLVKPSETLSLTCAVSGYSISSGYYWGWIRQPPGKGLEWIGSIYYSGSTYYNPSLKSRVTISVDTSKNQFSLKLSSVTAADTAVYYCARGRGATVTTHFDYWGQGTLVTVSS

SEQ ID NO: 72 - protein, 123 aa, Homo sapiens
QVQLVQSGAEVKKPGASVKVSCQASGYTFSSYGISWVRQAPGQGLEWMGWISAYSGNTNYAQKVQDRVTMTTETSTSTAYMELRSLRSDDTAMYYCARMGIVVAPAVGSLDYWGQGTLVTVSS

SEQ ID NO: 73 - protein, 122 aa, Homo sapiens
QVQLQESGPGLVRPSQTLSLTCTVSGDSINSGGYYWNWIRQPPGKGLEWIGYIYFTGRTNYNPSLGSRVTISLDSSKTQFSLKLTSMTAADTAVYYCARDRHDYGEDPFDIWGQGTMVTVSS

SEQ ID NO: 74 - protein, 123 aa, Homo sapiens
QVQLVQSGAEVKKPGSSVKVSCKASGMTSNSLAISWVRQAPGQGLEWMGGIIPVFETPKYAQKFQGRVTITADKSTNTAYMDLISLKSEDTAMYYCATSAGGIVNYYLSFNIWGQGTMVTVSS

SEQ ID NO: 75 - protein, 131 aa, Homo sapiens
QVQLQESGPGLVKPSQTLSLTCTVSGASISSGDSYWSWIRQPPGKGLEWIGYISNSGSTDYNPSLKSRVSISVDTSKSQFSLKLSSVDAADTAVYYCARDSRLLEWFTVDSPYDYYAMDVWGQGTTVTVSS

SEQ ID NO: 76 - protein, 120 aa, Homo sapiens
QVQLVQSGAEVKKPGSSVKVSCKASGGSFSTYAINWVRQAPGQGLEWMGGIIPVVGRADYAQKFRGRVTITADEFTSTAYMELSSLRSEDTAVYYCARDRSDEDYDIGYWGQGTLVTVSS

SEQ ID NO: 77 - protein, 121 aa, Homo sapiens
QVQLQESGPGLVKPSETLSLTCTVSGDSIRNYYWSWIRQAPGKGLESIGYIYYSGRAKYNPSLESRVTMSVDTSKNQFSLKLTSVTAADTAVYYCARDRTGAGDKNAFDVWGPGTMVTVSS

SEQ ID NO: 78 - protein, 128 aa, Homo sapiens
QVQLVQSGAEVKRPGASVRIACKASGDTLTSFGFSWVRQARGQGLEWMGWINGYNSNPNYAQIFQDRVTLTIDTYTSTAYMEFRSLVSDDTGIYYCARGASSTGTMGLRGKNDAFDIWGQGTMVTVSS

SEQ ID NO: 79 - protein, 121 aa, Homo sapiens
QVQLVQSGAEVKKPGSSVKVSCRASGGIFRSNAISWVRQAPGQGLEWMGEIIAVFGTANYAQKFQGRVTITADESTSTAYMELSSLRSEDTAVYYCARGPYYYGNSHLDFWGQGTMVTVSS

SEQ ID NO: 80 - protein, 109 aa, Homo sapiens
QVQLVQSGTEVKKPGSSVRISCEASGATFSSLGINWFRLGPGQGLEWMGAPIPLSGTPTYAQKFQGRLTITSGFMELSSLTSEDTAMYFCARKDAGSAYKSFDVWGQGT

SEQ ID NO: 81 - protein, 119 aa, Homo sapiens
QVQLVQSGAEVKKPGSSVKVSCKASGGTFGSYGINWVRQAPGQGLEWMGGITPIDGIPNYAQKFQGSVTITADESTRTAYMELSSLTSEDTAMYYCARDGGWLRTLDSWGQGTLVTVSS

SEQ ID NO: 82 - protein, 121 aa, Homo sapiens
QVQLVQSGAEVKKPGSSVKVSCKASGGTFRNFAVSWVRQAPGQGPEWMGGIIAIFGTAKYAQKFQGRVTISADESTRIVQMELSSLRSDDTAIYYCASSSGSYYGDYFDYWGQGTLVTVSS

SEQ ID NO: 83 - protein, 122 aa, Homo sapiens
EVQLLESGGGLVQPGGSLRLSCAASGFTFSSYAMSWVRQAPGKGLEWVSAISGSGGSTYYADSVKGRFTVSRDNSKSTLYLQMNSLRPEDTAIYYCARSTCGGSCYYRLDPWGQGTLVTVSS

SEQ ID NO: 84 - protein, 120 aa, Homo sapiens
EVQLVESGGGLVKPGGSLRLSCAASGFYFSDYGMNWVRQSAGRGLEWISYIASSGSNIYYADSVKGRFTISRDDAKNSLFLHMNSLRAEDTAVYYCARSPGIAVGLIDYWGQGSLVTVSS

SEQ ID NO: 85 - protein, 130 aa, Homo sapiens
EVQLVQSGAEVKKPGGSLKISCKTSGYSFNTYWIGWVRQVPGKGLEWMGMIYPGDSDTRYGPSFQGQVTISADKSVTTAYLRWSSVQASDSAIYYCARLGCGTTDCSPTWPYYYYGLDVWGQGTTVTVSS

SEQ ID NO: 86 - protein, 125 aa, Homo sapiens
EVQLLESGGGLVQPGGSLRLSCEASGFTFTSFGMNWVRQAPGKGLEWVAVISGSDGSTYYADSVKGRFTISRDNSNNTVYLQMNGLRVEDTAVYYCAKGLAYCSFGSCPYPLDYWGQGTLVTVSS

SEQ ID NO: 87 - protein, 130 aa, Homo sapiens
QVQLVQSGAEVKMPGSSVKVSCRASGGTFSTYTITWVRQAPGQGLEWMGVIYPVFGSANYAQNFQGRLMITADESPSTAYMELSSLRSEDTAVYYCARGRTSGSQDRLPLLWGLSGFDIWGQGTMVTVSS

SEQ ID NO: 88 - protein, 120 aa, Homo sapiens
EVQLVESGGGLVQPGGSLRLSCAVSGFRFEDYAMHWVRQAPGKGLEWVSGISWNSGAIGYADSVEGRFTISRDNAKNSLYLQMNNLRVEDTALYYCTKAHSATHQGFDYWGQGSLVTVSS

SEQ ID NO: 89 - protein, 127 aa, Homo sapiens
EVQLVESGGGLVQPGGSLRLSCSASGFTFSSYAMHWVRQAPGKGLEYVSAISSNGGSTYYADSVKGRFTISRDNSKNTLYLQMSSLRAEDTAVYYCVNGGRAFGVVIKYYYYGMDVWGQGTTVTVSS

SEQ ID NO: 90 - protein, 120 aa, Homo sapiens
QVQLVESGGGVVQPGRSLRLSCAASGFTFSTYGMHWVRQAPGKGLEWVAVIWYDGSNKYYADSVKGRFTISRDNSKNTLYLQMNSLRAEDTAVYYCARDSEGSGWYFDYWGQGTLVTVSS

SEQ ID NO: 91 - protein, 125 aa, Homo sapiens
EVQLVESGGGLVKPGGSLRLSCAASGFTFSSYSMNWVRQAPGKGLEWVSSISSSSSYIYYADSVKGRFTISRDNAKNSLYLQMNSLRAEDTAVYYCARRPSGFLEGYYYYYMDVWGKGTTVTVSS

SEQ ID NO: 92 - protein, 120 aa, Homo sapiens; identical to SEQ ID NO: 90

SEQ ID NO: 93 - protein, 118 aa, Homo sapiens
QVQLQESGPGLVKPSDTLFLTCAVSGYSIDSGHWWGWIRQPPGTGLEYIGYTYYSGSTYANPSLRSRITMSLDTSKNQFSLKVSSVTAVDTAVYYCALGLTSGWIDYWGQGILVTVSS

SEQ ID NO: 94 - protein, 125 aa, Homo sapiens
EVQLVESGGGLVKPGGSLRLSCSASGFTFNIYAMNWVRQVPGKGLDWVSSISSRGDYIYYAESVEGRFTISRDNAKNSLYLEMNSLRAEDTAVYYCARAGLGTVDLRWGGAFDHWGKGILVTVSS

SEQ ID NO: 95 - protein, 108 aa, Homo sapiens
EIVMTQSPATLSVSPGERATLSCRASQSVSSYLAWYQQKPGQAPRLLIYHASTRATGIPARFSGSGSGTEFTLTISGLQSEDFAVYYCQQYSQWPPLTFGGGTKVEIK

SEQ ID NO: 96 - protein, 107 aa, Homo sapiens
DIQLTQSPSFLSAFVGDRVTITCRASQGISNYFAWYQQKPGTAPKLLIHTASTLQSGVPSRFSGSGSGTVFTLTISSLQPEDFATYYCQQLNNYPYTFGQGTKVEIK

SEQ ID NO: 97 - protein, 108 aa, Homo sapiens
DIQMTQSPSTLSASVGDRVTITCRASQNINTWLAWYQQKPGEAPNLLIFDASILESGGPSRFSGSGSGTEFTLTISSLQPDDFATYYCQQYHSHSKLTFGGGTKVEIK

SEQ ID NO: 98 - protein, 108 aa, Homo sapiens
EIVLTQSPGTLSLSPGERATLSCRASQSVTGGFLAWYQQKPGQAPRLLIYGPSSRATGIPDRFSGSGSGTDFTLTISRLEPEDFAVYYCQQYGSSPTTFGQGTKVEIK

SEQ ID NO: 99 - protein, 110 aa, Homo sapiens
VMTQSPLSLPVTLGQPASISCRSSQGLVSSDGSTYLSWYQQRPGQSPRRLFYKVSARDSGVPDRFSASGSGTDFTLKISRVEAEDVGVYYCLQGTHWPRTFGQGTKVEIK

SEQ ID NO: 100 - protein, 107 aa, Homo sapiens
DIQLTQSPSFLSASVGDRVTITCRANQGISSSLAWYQQRPGKAPKLLIYAASTLQSGVPSRFSGSGSGTEFTLTISSLQPEDFASYYCQQLNSFPPTFGQGTKVEIK

SEQ ID NO: 101 - protein, 107 aa, Homo sapiens
EIVLTQSPATLSLSPGERATLSCRASQSVRFYLAWYQQKPGQAPRLLIYDASTRATGIPARFSGSGSGTDFSLTISSLETEDFAVYYCQQRINWPLTFGGGTKVEIK

SEQ ID NO: 102 - protein, 107 aa, Homo sapiens
EIVLTQSPATLSLSPGERATLSCRASQSVSHYLAWFQQKPGQPPRLLIYDVSTRATGIPARFSGSGSGTDFTLTISSLEPEDFAVYYCQQRNNWPLTFGGGTKVEIK

SEQ ID NO: 103 - protein, 108 aa, Homo sapiens
EIVLTQSPGTLSLSPGERATLSCRASQSISNNYLAWYQQKPGQAPRLLIYGAFSRATGIPDRFSGSGSGTDFTLTISRLEPEDFAVYHCQQYGSSPRTFGQGTKVEIK

SEQ ID NO: 104 - protein, 113 aa, Homo sapiens
DIVMTQSPDSLAVSLGERATINCRSSQNVLHSSKNKNYLGWYQHKPGQPPKLLIYWASTRESGVPDRFSGSGSGTNFTLTISSLQAEDVALYYCQQYYSSPLTFGPGTKVDIK

SEQ ID NO: 105 - protein, 104 aa, Homo sapiens
EIVLTQSPATLSLSPGERATLSCRASQSVSSYLAWYQQKPGQAPRLLIYDASNRATDIPARFSGSGSGTDFTLTISSLEPEDFAVYYCQQRRNTFGGGTKVEIK

SEQ ID NO: 106 - protein, 106 aa, Homo sapiens
DIQMTQSPSTLSASVGDRVSITCRASQTISTWLAWYQQKPGKAPKLLIYDASTLESGVPSRFSGSGSGTEFTLTISSLQPDDFATYYCQQYNNYSGFGQGTKVEIK

SEQ ID NO: 107 - protein, 106 aa, Homo sapiens
DIQMTQSPSTLSASVGDRVTITCRASQTIISWLAWYQQKPGKAPKLLIYDASTLESGVPSRFSGSGSGTEFTLTISSLQPDDFATYYCQQYNSYSGFGQGTKVEIK

SEQ ID NO: 108 - protein, 112 aa, Homo sapiens
DVVMTQSPLALPVTLGQSASISCRSSQSLVDRDGNIYLIWFHQRPGQSPRRLIYEVSKRDSGVPDRISGSGSHTDFTLRISRVEAEDVGVYYCMQATHWPRTFGQGTKVEIK

SEQ ID NO: 109 - protein, 106 aa, Homo sapiens
EIVLTQSPATLSLSPGERATLSCRASQSVSSYLAWYQQKPGQAPRLLIYDASKRATGIPARFSGSGSGTDFTLTISSLEPEDFAVYYCQQRSNWLTFGGGTKVEIK

SEQ ID NO: 110 - protein, 112 aa, Homo sapiens
DIVMTQSPLSLPVTPGEPASISCRSSQSLLHSSGYNYLDWYLQKPGQSPQVLIYLGSTRASGVPDRFSGSGSGTDFTLKISRVEAEDVGVYYCMQALQTPLTFGQGTKVEIK

SEQ ID NO: 111 - protein, 114 aa, Homo sapiens
DIVMTQSPDSLAVPLGERATINCKSSQSVSYSSTNKNCLAWYQQKSGQPPKLLIYWASTRESGVPDRFSGSGSGTDFTLTISSLQAEDVAIYYCQQYCGTPLYTFGQGTKVEIK

SEQ ID NO: 112 - protein, 106 aa, Homo sapiens
EIVMTQSPATLSVSPGERATLSCRASKSISSNLAWYQQEPGQAPRLLIYGASTRATGIPARFSGSGSGTEFTLTISSLQSEDFAVYYCQQYNNWPTFGQGTKVEIK

SEQ ID NO: 113 - protein, 107 aa, Homo sapiens
DIQMTQSPSSLSASVGDRVTFTCQASQDISNSLNWYQQKPGKAPNILIYDASNLETGVPSRFSGSGSGTDFTFTITSLQPEDIATYYCQHYDNVPPTFGGGTKVEIK

SEQ ID NO: 114 - protein, 107 aa, Homo sapiens
DIQMTQSPSTLSASVGDRVTIACRASQSISDWLAWYQQKPGKAPKLLIHKASSLESGVPSRFSGGGSGTEFTLTISSLQADDSATYYCQHYNTYSGTFGQGTKVEIK

SEQ ID NO: 115 - protein, 109 aa, Homo sapiens
EIVMTQSPATVSVSPGERATLSCRASQSVTNNVAWYQQKPGQAPRLLIYGASTRATGIPARFSGSGSGTDFILTISSLQSEDFALYYCQHYNRWPLGFTFGPGTKVDIK

SEQ ID NO: 116 - protein, 106 aa, Homo sapiens
EIVMTQSPATLSVSPGERATLSCRASEGISSHLAWYQQRPGQAPRLLIYGASTRATGIPARFRGSGSGTDFTLTISSVQSEDFAVYYCQQYNNWPHFGGGTKVEIK

SEQ ID NO: 117 - protein, 113 aa, Homo sapiens
DIVMTQTPLSSPVTLGQPASISCRSSQSLVHSDGNTYLSWLQQRPGQPPRLLIYKISNRFSGVPDRFSGSGAGTDFTLKISRVEAEDVGVYYCMQATQFPSITFGQGTRLEIK

SEQ ID NO: 118 - protein, 108 aa, Homo sapiens
EIVLTQSPGTLSLSPGERATLSCRASQSISSSYLAWYQRKPGQAPRLLIYGASSRATGIPDRFSGGGSGTDFTLTISRLEPEDFGVYYCQQYGTSPWTFGQGTKVEIK

SEQ ID NO: 119 - protein, 107 aa, Homo sapiens
DIQMTQSPSSLSASVGDRITITCRASQGIRNYVAWYQQKPGRVPKLLIYAASTLQSGVPSRFSGSGSGTEFTLTISSLQAEDVATYYCQKYNSVPLTFGGGTKVEIK

SEQ ID NO: 120 - protein, 107 aa, Homo sapiens
DIQMTQSPSTLSASVGDRVTITCRASQTITTWLAWYQQKPGQAPKLLIHKTSTLETGVPSRFSGSGSGTQFTLTITNLQPDDSATYYCQQYSTYSGTFGQGTKVEIK

SEQ ID NO: 121 - protein, 107 aa, Homo sapiens
DIQMTQSPSSLSASVGDRVTITCRAGQNVRDYLNWYQQKPGKAPKLLIYTASSLQSGVPSRFSGSGSGTDFTLTISSLQPEDFATYYCQQTYSPPRTFGQGTKVEIK

SEQ ID NO: 122 - protein, 113 aa, Homo sapiens
DIVMTQSPDSLAVSLGERATINCKSSQSVLFSSNNKHYLAWFQQKPGQPPKLLIYWASTRESGVPDRFSGSGSGTDFTLTITSLQPEDVAVYYCQQYYSTSWTFGQGTKVEIK

SEQ ID NO: 123 - protein, 107 aa, Homo sapiens
DIQMTQSPSSLSASVGDRVTITCRASQTIKKYLNWYQQEPGKAPKLLIYTASSLQSGIPSRFSGSGSGTDFTLIITSLQPEDVATYYCQQSYDTPQTFGRGTKVEIK

SEQ ID NO: 124 - protein, 107 aa, Homo sapiens
DIQMTQSPSSLSASVGDRVTITCRASRGIADYLAWYQQKPGKVPQLLIYAASTLQSGVPSRFSGSGSGTVFTLTISRLQPEDVATYYCQVYISAPYTFGQGTKVEIK

SEQ ID NO: 125 - protein, 108 aa, Homo sapiens
EIVLTQSPGTLSLSPGERATLSCRASQSVSSNYLAWYQQKPGQAPRLLIYGASNRATGIPDRFSGSGSGTDFTLAISRLEPEDFAVYYCQQYGTSPRTFGQGTKVEIK

SEQ ID NO: 126 - protein, 112 aa, Homo sapiens
DIVMTQSPLSLPATPGESASISCRSSQILLHGNGNNYLDWYVQKPGQSPQLLIYLGSRRASGVPDRFSGSGSGTDFALKISRVEAEDVGVYYCMQSLQTPPTFGQGTKVEIK

SEQ ID NO: 127 - protein, 110 aa, Homo sapiens
EIVLTQSPGTLSLSPGDRATLSCRASQRVSNNFLAWYQQKPGLAPRLLFYGVSTRATGIPDRFSGSGSGTDFTLTISRLEPEDFAVYYCQYYVSSPRRFTFGPGTKVDIK

SEQ ID NO: 128 - protein, 107 aa, Homo sapiens
EIVMTQSPATLSVSPGERATLSCRASQSVSSNLAWYQQTPGQAPRLLIYAASSRATGIPARFSGSGSGTEFTLSISSLQPEDFAVYYCQQYNNWPRTFGQGTKVEIK

SEQ ID NO: 129 - protein, 112 aa, Homo sapiens
DIVMTQSPLSLPVTPGEPASISCRSSQSLLHTNGYSYVDWYLQKPGQSPQLLIYLVSNRASGVPDRFSGSGSGTDFTLKISRVEAEDVGVYYCMQPLQTPFTFGPGTKVDIK

SEQ ID NO: 130 - protein, 108 aa, Homo sapiens
EIVLTQSPGTLSLSPGERATLSCRASQTVSSTFLAWYQQKPGQAPRLLIFGASTRAAGIPDRFSGSGSGTDFTLTISRLEPEDFAVYYCQQYGRSPRTFGQGTKVEIK

SEQ ID NO: 131 - protein, 107 aa, Homo sapiens
EIVLTQSPGTLSLSPGERATLSCRASQTVSGSFLAWYQQKPGQAPRLLIYGASSRPTGIPDRFSGSGSGTHFTLTITRLEPEDFAVYYCQQYGRSPTFGQGTRLEIK

SEQ ID NO: 132 - protein, 113 aa, Homo sapiens
DIVMTQSPDSLAVSLGETATINCRSSQSVLYPSNSRNYLAWYQQKPGQPPKLLIYWASTRDSGVPDRFSGSGSGADFTLTITSLQAEDVAVYYCQQYVTSPRTFGQGTKVEIK

SEQ ID NO: 133 - protein, 106 aa, Homo sapiens
EIVLTQSPATLSLSAGERATLSCRASQSVSSYLAWYQQKPGQAPRLLIFDASNRASGIPARFSGSGSGTDFTLTISSLEPEDFAVYYCQQSSNWVTFGAGTKVEIK

SEQ ID NO: 134 - protein, 108 aa, Homo sapiens
EIVMTQSPATLSVSPGERATLSCRASQSASNNLAWYQQKPGQTPRLLIYGVSTRATGVPARFSGSGSGTEFTLTISSLQSEDFAVYYCQQYNGWPLYTFGQGTKVEIK

SEQ ID NO: 135 - protein, 107 aa, Homo sapiens
DIQMTQSPSSLSASVGDRVTITCRASQSISISLKWYQQKPGKAPKLLIYAASSLQSGVPSRFSGSGSGTDFTLTISSLQPEDFATYYCQQSYSTPITFGQGTRLEIK

SEQ ID NO: 136 - protein, 107 aa, Homo sapiens
EIVMTQSPATLSVSPGERATLSCRASQSVSSNLAWYQQKPGQAPRLLIYGASTRATGIPARFSGSGSGTEFTLTISSLQSEDFAVYYCQQYNNWPLTFGGGTKVEIK

SEQ ID NO: 137 - protein, 107 aa, Homo sapiens
DIQMTQSPSSLSASVGDRVTITCRASQSISISLNWYQQKPGKAPKLLIYAASSLQSGVPSRFSGSGSGTDFTLTISSLQPEDFATYYCQQSYSTPITFGQGTRLEIK

SEQ ID NO: 138 - protein, 106 aa, Homo sapiens
DIQMTQSPSTLSASVGDRVTITCRASQSISNWLAWYQQKPGKAPKLLIYKASTLQSGVPSRFSGSGSGTEFTLTINSLQPDDFATYYCQQYNSFRTFGQGTKVEIK

SEQ ID NO: 139 - protein, 108 aa, Homo sapiens
EIVMTQSPATLSVSPGERATLSCRASQSVSSNLAWYQNKPGQAPRLLIYGASTRATGVPARFSGSGSGTEFTLSISSLQSEDFAVYYCQHYNDWPSCSFGQGTKLEIT

SEQ ID NO: 140 - protein, 107 aa, Homo sapiens
DIQMTQSPSSLSASVGDRVTISCQASQDITNFLNWYQQKSGEAPKLLIYDASDLETGVPSRFSGSGSGTDFTFTISRLQPEDTATYYCQQYDDLPYTFGQGTKVEIK

SEQ ID NO: 141 - protein, 98 aa, Homo sapiens
EVQLVESGGGLVKPGGSLRLSCTASGFNFNNHGMNWLRQAPGKGLEWVASISSGSRSHFYADSLEGRFTVSRDNAKNSLFLQMNSLRAEDTAVYYCAR

SEQ ID NO: 142 - protein, 95 aa, Homo sapiens
EIVMTQSPATLSVSPGERATLSCRASQSVSSYLAWYQQKPGQAPRLLIYHASTRATGIPARFSGSGSGTEFTLTISGLQSEDFAVYYCQQYSQWP

SEQ ID NO: 143 - protein, 98 aa, Homo sapiens
EVQLVESGGGLVKPEGSLRLSCEASGFIIDTYSMNWVRQAPGKGLEWVSTISSTSNYIYYADSVKGRFTISRDNAKNSVFLQMNSLRVEDTAIYYCVR

SEQ ID NO: 144 - protein, 92 aa, Homo sapiens
DIQLTQSPSFLSAFVGDRVTITCRASQGISNYFAWYQQKPGTAPKLLIHTASTLQSGVPSRFSGSGSGTVFTLTISSLQPEDFATYYCQQLN

SEQ ID NO: 145 - protein, 98 aa, Homo sapiens
QVQLVESGGGVVQPGRSLRLSCAASGFTFSNFGMYWVRQAPGKGLDWVAVISYDGSNTYYADSVKGRFTISRDNSKNTLSLQLNSLKPVDTAVYYCAK

SEQ ID NO: 146 - protein, 94 aa, Homo sapiens
DIQMTQSPSTLSASVGDRVTITCRASQNINTWLAWYQQKPGEAPNLLIFDASILESGGPSRFSGSGSGTEFTLTISSLQPDDFATYYCQQYHSH

SEQ ID NO: 147 - protein, 97 aa, Homo sapiens
VQLVESGGGLVEPGGSLRLSCAASGFTFSDYQMSWIRQAPGKGLEWLSDITSTGNAKYHADSVKGRFTVSRDNAKRSLYLQMNSLRAEDTAVYFCVR

SEQ ID NO: 148 - protein, 95 aa, Homo sapiens
EIVLTQSPGTLSLSPGERATLSCRASQSVTGGFLAWYQQKPGQAPRLLIYGPSSRATGIPDRFSGSGSGTDFTLTISRLEPEDFAVYYCQQYGSS

SEQ ID NO: 149 - protein, 98 aa, Homo sapiens
EVQLVESGGGWVQPGGSLRLSCEASGFTFSLFWMGWVRQAPGKGLEWVATMKQDGSEYYYVDSVKGRFTISRDNPKNSLYLQMNSLRAEDTAVYYCAR

SEQ ID NO: 150 - protein, 98 aa, Homo sapiens
VMTQSPLSLPVTLGQPASISCRSSQGLVSSDGSTYLSWYQQRPGQSPRRLFYKVSARDSGVPDRFSASGSGTDFTLKISRVEAEDVGVYYCLQGTHWP

SEQ ID NO: 151 - protein, 98 aa, Homo sapiens
QVQLVESGGGLVKPGGSLRLSCAASGFTFSGYYMSWVRQAPGKGLEWVSYISHRGNMIHYQDSMKGRFIISRDNANNSLYLQMNSLRAEDTAVYYCAR

SEQ ID NO: 152 - protein, 92 aa, Homo sapiens
DIQLTQSPSFLSASVGDRVTITCRANQGISSSLAWYQQRPGKAPKLLIYAASTLQSGVPSRFSGSGSGTEFTLTISSLQPEDFASYYCQQLN

SEQ ID NO: 153 - protein, 97 aa, Homo sapiens
EVQLLESGGGLVQPGGSLRLSCAASGLNFISYAMSWVRQAPGRGLEWVSVVSGTGGTTFYGDSVQGRFTISRDNSKNMLYLQMDSLRAEDTAKYFCA

SEQ ID NO: 154 - protein, 94 aa, Homo sapiens
EIVLTQSPATLSLSPGERATLSCRASQSVRFYLAWYQQKPGQAPRLLIYDASTRATGIPARFSGSGSGTDFSLTISSLETEDFAVYYCQQRINW

SEQ ID NO: 155 - protein, 98 aa, Homo sapiens
EVQLLESGGDLVQPGGSLRLSCVVSGYTFDYSAMNWVRQAPGKGLEWVSTIFGADAHTYYADAVKGRFTISRDRSKNTLYLQMSSLRAEDTAVYYCVK

SEQ ID NO: 156 - protein, 95 aa, Homo sapiens
EIVLTQSPATLSLSPGERATLSCRASQSVSHYLAWFQQKPGQPPRLLIYDVSTRATGIPARFSGSGSGTDFTLTISSLEPEDFAVYYCQQRNNWP

SEQ ID NO: 157 - protein, 96 aa, Homo sapiens
QVQLQESGPGLVKPSGTLSLTCAVSGVSISMINWWTWVRQPPGKGLEWIGEIYHNGSTTYNPSLKTRVTIAIDKSKNQFSLELNSVTAADTAIYYC

SEQ ID NO: 158 - protein, 96 aa, Homo sapiens
EIVLTQSPGTLSLSPGERATLSCRASQSISNNYLAWYQQKPGQAPRLLIYGAFSRATGIPDRFSGSGSGTDFTLTISRLEPEDFAVYHCQQYGSSP

SEQ ID NO: 159 - protein, 98 aa, Homo sapiens
EVQLVQSGVEVKKPGESLKISCKGSGYSFTNYWIGWVRQVPGKGLEWMGSIYSGGSTTIYSPSFQGQVTISADKSNSTAYLQWRSLKASDTAMYYCAR

SEQ ID NO: 160 - protein, 100 aa, Homo sapiens
DIVMTQSPDSLAVSLGERATINCRSSQNVLHSSKNKNYLGWYQHKPGQPPKLLIYWASTRESGVPDRFSGSGSGTNFTLTISSLQAEDVALYYCQQYYSS

SEQ ID NO: 161 - protein, 98 aa, Homo sapiens
QVQLQESGPGLVKPSGTLSLTCAVSGASISSTNWWSWVRQPPGKGLEWIGEIYHNGSTNYNPSLKSRVTISVDKSKNQFSLRLSSVTAADTAVYYCAR

SEQ ID NO: 162 - protein, 93 aa, Homo sapiens
EIVLTQSPATLSLSPGERATLSCRASQSVSSYLAWYQQKPGQAPRLLIYDASNRATDIPARFSGSGSGTDFTLTISSLEPEDFAVYYCQQRRN

SEQ ID NO: 163 - protein, 97 aa, Homo sapiens
QVQLVQSGSELKKPGASVKVSCKASGYTFTTYSMNWVRQAPGQGLEWMGWINTYTGNPTYAQAFTGRFVFSLDTSVSTAFLQITSLKAEDTAVYYCA

SEQ ID NO: 164 - protein, 95 aa, Homo sapiens
DIQMTQSPSTLSASVGDRVSITCRASQTISTWLAWYQQKPGKAPKLLIYDASTLESGVPSRFSGSGSGTEFTLTISSLQPDDFATYYCQQYNNYS

SEQ ID NO: 165 - protein, 97 aa, Homo sapiens
QVQLVQSGSELKKPGASVKVSCKASGYTFTSYAMNWVRQAPGQGLEWMGWINTYTGNPTYAQAFTGRFVFSSDTSASTAYLQINSLKAEDTAVYYCA

SEQ ID NO: 166 - protein, 95 aa, Homo sapiens
DIQMTQSPSTLSASVGDRVTITCRASQTIISWLAWYQQKPGKAPKLLIYDASTLESGVPSRFSGSGSGTEFTLTISSLQPDDFATYYCQQYNSYS

SEQ ID NO: 167 - protein, 98 aa, Homo sapiens
QVQLVQSGSEVKRPGASVQVSCKTSGYTFSDYGMSWVRQAPGQGLEWMGWINVNVGNTNYAQKFQGRVSVTTDTSAGTAYLELRSLTSDDTAVYYCAR

SEQ ID NO: 168 - protein, 100 aa, Homo sapiens
DVVMTQSPLALPVTLGQSASISCRSSQSLVDRDGNIYLIWFHQRPGQSPRRLIYEVSKRDSGVPDRISGSGSHTDFTLRISRVEAEDVGVYYCMQATHWP

SEQ ID NO: 169 - protein, 97 aa, Homo sapiens
QVQLQQWGAGLLKPSETLSLTCAVYGGSFGGYYWNWIRQPPGKGLEWIGEINHSGSTNYNPSLKSRVTLSVDTSKNQVSLNVSSVTAADTAVYYCAR

SEQ ID NO: 170 - protein, 94 aa, Homo sapiens
EIVLTQSPATLSLSPGERATLSCRASQSVSSYLAWYQQKPGQAPRLLIYDASKRATGIPARFSGSGSGTDFTLTISSLEPEDFAVYYCQQRSNW

SEQ ID NO: 171 - protein, 100 aa, Homo sapiens
DIVMTQSPLSLPVTPGEPASISCRSSQSLLHSSGYNYLDWYLQKPGQSPQVLIYLGSTRASGVPDRFSGSGSGTDFTLKISRVEAEDVGVYYCMQALQTP

SEQ ID NO: 172 - protein, 99 aa, Homo sapiens
QVQLQESGPGLVKPSQTLSLTCTVSGASINSGGYYWSWIRQHPGKGLEWIGYIYFTGRTNYNPSLKSRVTISIATSKTQFSLKLSSVTAADTAVYYCAR

SEQ ID NO: 173 - protein, 100 aa, Homo sapiens
DIVMTQSPDSLAVPLGERATINCKSSQSVSYSSTNKNCLAWYQQKSGQPPKLLIYWASTRESGVPDRFSGSGSGTDFTLTISSLQAEDVAIYYCQQYCGT

SEQ ID NO: 174 - protein, 99 aa, Homo sapiens
QVQLQESGPGLVKPSETLSLTCSVSGGSVSSGIYHWTWIRQPPGKGLEWIGYIYYSGSTYYNPSLKSRVTISLDTSKNHFSLRLSSVTAADTAVYYCAR

SEQ ID NO: 175 - protein, 94 aa, Homo sapiens
EIVMTQSPATLSVSPGERATLSCRASKSISSNLAWYQQEPGQAPRLLIYGASTRATGIPARFSGSGSGTEFTLTISSLQSEDFAVYYCQQYNNW

SEQ ID NO: 176 - protein, 98 aa, Homo sapiens
QVQLVQSGTEVKKPESSVKVSCEASGGPFGSYAVSWVRQAPGQRLEWIGGIIPIFGTPYYAQKFQGRITITADESTSTAYMELSSLRSDDTAVYYCGR

SEQ ID NO: 177 - protein, 95 aa, Homo sapiens
DIQMTQSPSSLSASVGDRVTFTCQASQDISNSLNWYQQKPGKAPNILIYDASNLETGVPSRFSGSGSGTDFTFTITSLQPEDIATYYCQHYDNVP

SEQ ID NO: 178 - protein, 97 aa, Homo sapiens; identical to SEQ ID NO: 11

SEQ ID NO: 179 - protein, 94 aa, Homo sapiens; identical to SEQ ID NO: 14

SEQ ID NO: 180 - protein, 99 aa, Homo sapiens
RLQLQESGPGLVKPSETLSLTCTASGGSVNSGGYYWGWIRQPPGKGPEWIGTIYNSGSVDYNPSLKSRVAISIDTFENQFSLKLSSVTAADTAVYYCAR

SEQ ID NO: 181 - protein, 95 aa, Homo sapiens
EIVMTQSPATVSVSPGERATLSCRASQSVTNNVAWYQQKPGQAPRLLIYGASTRATGIPARFSGSGSGTDFILTISSLQSEDFALYYCQHYNRWP

SEQ ID NO: 182 - protein, 97 aa, Homo sapiens
EVQLVESGGGLVQPGRSLRLSCAASGFTFDDYAMTWVRQAPGKGLEWVSGISWDSGAIGYADSVKGRFTISRDNAKNSLYLQMNSLRTEDTALYFCA

SEQ ID NO: 183 - protein, 94 aa, Homo sapiens
EIVMTQSPATLSVSPGERATLSCRASEGISSHLAWYQQRPGQAPRLLIYGASTRATGIPARFRGSGSGTDFTLTISSVQSEDFAVYYCQQYNNW

SEQ ID NO: 184 - protein, 98 aa, Homo sapiens
QVQLQESGPGLVKPSETLSLTCAVSGYSISSGYYWGWIRQPPGKGLEWIGSIYYSGSTYYNPSLKSRVTISVDTSKNQFSLKLSSVTAADTAVYYCAR

SEQ ID NO: 185 - protein, 99 aa, Homo sapiens
DIVMTQTPLSSPVTLGQPASISCRSSQSLVHSDGNTYLSWLQQRPGQPPRLLIYKISNRFSGVPDRFSGSGAGTDFTLKISRVEAEDVGVYYCMQATQF

SEQ ID NO: 186 - protein, 98 aa, Homo sapiens
QVQLVQSGAEVKKPGASVKVSCQASGYTFSSYGISWVRQAPGQGLEWMGWISAYSGNTNYAQKVQDRVTMTTETSTSTAYMELRSLRSDDTAMYYCAR

SEQ ID NO: 187 - protein, 95 aa, Homo sapiens
EIVLTQSPGTLSLSPGERATLSCRASQSISSSYLAWYQRKPGQAPRLLIYGASSRATGIPDRFSGGGSGTDFTLTISRLEPEDFGVYYCQQYGTS

SEQ ID NO: 188 - protein, 99 aa, Homo sapiens
QVQLQESGPGLVRPSQTLSLTCTVSGDSINSGGYYWNWIRQPPGKGLEWIGYIYFTGRTNYNPSLGSRVTISLDSSKTQFSLKLTSMTAADTAVYYCAR

SEQ ID NO: 189 - protein, 94 aa, Homo sapiens
DIQMTQSPSSLSASVGDRITITCRASQGIRNYVAWYQQKPGRVPKLLIYAASTLQSGVPSRFSGSGSGTEFTLTISSLQAEDVATYYCQKYNSV

SEQ ID NO: 190 - protein, 97 aa, Homo sapiens; identical to SEQ ID NO: 4

SEQ ID NO: 191 - protein, 94 aa, Homo sapiens; identical to SEQ ID NO: 7

SEQ ID NO: 192 - protein, 99 aa, Homo sapiens
QVQLQESGPGLVKPSQTLSLTCTVSGASISSGDSYWSWIRQPPGKGLEWIGYISNSGSTDYNPSLKSRVSISVDTSKSQFSLKLSSVDAADTAVYYCAR

SEQ ID NO: 193 - protein, 95 aa, Homo sapiens
DIQMTQSPSSLSASVGDRVTITCRAGQNVRDYLNWYQQKPGKAPKLLIYTASSLQSGVPSRFSGSGSGTDFTLTISSLQPEDFATYYCQQTYSPP

SEQ ID NO: 194 - protein, 98 aa, Homo sapiens
QVQLVQSGAEVKKPGSSVKVSCKASGGSFSTYAINWVRQAPGQGLEWMGGIIPVVGRADYAQKFRGRVTITADEFTSTAYMELSSLRSEDTAVYYCAR

SEQ ID NO: 195 - protein, 100 aa, Homo sapiens
DIVMTQSPDSLAVSLGERATINCKSSQSVLFSSNNKHYLAWFQQKPGQPPKLLIYWASTRESGVPDRFSGSGSGTDFTLTITSLQPEDVAVYYCQQYYST

SEQ ID NO: 196 - protein, 97 aa, Homo sapiens
QVQLQESGPGLVKPSETLSLTCTVSGDSIRNYYWSWIRQAPGKGLESIGYIYYSGRAKYNPSLESRVTMSVDTSKNQFSLKLTSVTAADTAVYYCAR

SEQ ID NO: 197 - protein, 95 aa, Homo sapiens
DIQMTQSPSSLSASVGDRVTITCRASQTIKKYLNWYQQEPGKAPKLLIYTASSLQSGIPSRFSGSGSGTDFTLIITSLQPEDVATYYCQQSYDTP

SEQ ID NO: 198 - protein, 98 aa, Homo sapiens
QVQLVQSGAEVKRPGASVRIACKASGDTLTSFGFSWVRQARGQGLEWMGWINGYNSNPNYAQIFQDRVTLTIDTYTSTAYMEFRSLVSDDTGIYYCAR

SEQ ID NO: 199 - protein, 94 aa, Homo sapiens
DIQMTQSPSSLSASVGDRVTITCRASRGIADYLAWYQQKPGKVPQLLIYAASTLQSGVPSRFSGSGSGTVFTLTISRLQPEDVATYYCQVYISA

SEQ ID NO: 200 - protein, 97 aa, Homo sapiens; identical to SEQ ID NO: 18

SEQ ID NO: 201 - protein, 96 aa, Homo sapiens; identical to SEQ ID NO: 21

SEQ ID NO: 202 - protein, 91 aa, Homo sapiens
QVQLVQSGTEVKKPGSSVRISCEASGATFSSLGINWFRLGPGQGLEWMGAPIPLSGTPTYAQKFQGRLTITSGFMELSSLTSEDTAMYFCA

SEQ ID NO: 203 - protein, 100 aa, Homo sapiens
DIVMTQSPLSLPATPGESASISCRSSQILLHGNGNNYLDWYVQKPGQSPQLLIYLGSRRASGVPDRFSGSGSGTDFALKISRVEAEDVGVYYCMQSLQTP

SEQ ID NO: 204 - protein, 98 aa, Homo sapiens
QVQLVQSGAEVKKPGSSVKVSCKASGGTFGSYGINWVRQAPGQGLEWMGGITPIDGIPNYAQKFQGSVTITADESTRTAYMELSSLTSEDTAMYYCAR

SEQ ID NO: 205 - protein, 95 aa, Homo sapiens
EIVLTQSPGTLSLSPGDRATLSCRASQRVSNNFLAWYQQKPGLAPRLLFYGVSTRATGIPDRFSGSGSGTDFTLTISRLEPEDFAVYYCQYYVSS

SEQ ID NO: 206 - protein, 97 aa, Homo sapiens
QVQLVQSGAEVKKPGSSVKVSCKASGGTFRNFAVSWVRQAPGQGPEWMGGIIAIFGTAKYAQKFQGRVTISADESTRIVQMELSSLRSDDTAIYYCA

SEQ ID NO: 207 - protein, 95 aa, Homo sapiens
EIVMTQSPATLSVSPGERATLSCRASQSVSSNLAWYQQTPGQAPRLLIYAASSRATGIPARFSGSGSGTEFTLSISSLQPEDFAVYYCQQYNNWP

SEQ ID NO: 208 - protein, 97 aa, Homo sapiens
EVQLLESGGGLVQPGGSLRLSCAASGFTFSSYAMSWVRQAPGKGLEWVSAISGSGGSTYYADSVKGRFTVSRDNSKSTLYLQMNSLRPEDTAIYYCA

SEQ ID NO: 209 - protein, 99 aa, Homo sapiens
DIVMTQSPLSLPVTPGEPASISCRSSQSLLHTNGYSYVDWYLQKPGQSPQLLIYLVSNRASGVPDRFSGSGSGTDFTLKISRVEAEDVGVYYCMQPLQT

SEQ ID NO: 210 - protein, 98 aa, Homo sapiens
EVQLVESGGGLVKPGGSLRLSCAASGFYFSDYGMNWVRQSAGRGLEWISYIASSGSNIYYADSVKGRFTISRDDAKNSLFLHMNSLRAEDTAVYYCAR

SEQ ID NO: 211 - protein, 96 aa, Homo sapiens
EIVLTQSPGTLSLSPGERATLSCRASQTVSSTFLAWYQQKPGQAPRLLIFGASTRAAGIPDRFSGSGSGTDFTLTISRLEPEDFAVYYCQQYGRSP

SEQ ID NO: 212 - protein, 98 aa, Homo sapiens
EVQLVQSGAEVKKPGGSLKISCKTSGYSFNTYWIGWVRQVPGKGLEWMGMIYPGDSDTRYGPSFQGQVTISADKSVTTAYLRWSSVQASDSAIYYCAR

SEQ ID NO: 213 - protein, 95 aa, Homo sapiens
EIVLTQSPGTLSLSPGERATLSCRASQTVSGSFLAWYQQKPGQAPRLLIYGASSRPTGIPDRFSGSGSGTHFTLTITRLEPEDFAVYYCQQYGRS

SEQ ID NO: 214 - protein, 98 aa, Homo sapiens
EVQLLESGGGLVQPGGSLRLSCEASGFTFTSFGMNWVRQAPGKGLEWVAVISGSDGSTYYADSVKGRFTISRDNSNNTVYLQMNGLRVEDTAVYYCAK

SEQ ID NO: 215 - protein, 101 aa, Homo sapiens
DIVMTQSPDSLAVSLGETATINCRSSQSVLYPSNSRNYLAWYQQKPGQPPKLLIYWASTRDSGVPDRFSGSGSGADFTLTITSLQAEDVAVYYCQQYVTSP

SEQ ID NO: 216 - protein, 98 aa, Homo sapiens
QVQLVQSGAEVKMPGSSVKVSCRASGGTFSTYTITWVRQAPGQGLEWMGVIYPVFGSANYAQNFQGRLMITADESPSTAYMELSSLRSEDTAVYYCAR

SEQ ID NO: 217 - protein, 94 aa, Homo sapiens
EIVLTQSPATLSLSAGERATLSCRASQSVSSYLAWYQQKPGQAPRLLIFDASNRASGIPARFSGSGSGTDFTLTISSLEPEDFAVYYCQQSSNW

SEQ ID NO: 218 - protein, 98 aa, Homo sapiens
EVQLVESGGGLVQPGGSLRLSCAVSGFRFEDYAMHWVRQAPGKGLEWVSGISWNSGAIGYADSVEGRFTISRDNAKNSLYLQMNNLRVEDTALYYCTK

SEQ ID NO: 219 - protein, 94 aa, Homo sapiens
EIVMTQSPATLSVSPGERATLSCRASQSASNNLAWYQQKPGQTPRLLIYGVSTRATGVPARFSGSGSGTEFTLTISSLQSEDFAVYYCQQYNGW

SEQ ID NO: 220 - protein, 97 aa, Homo sapiens
EVQLVESGGGLVQPGGSLRLSCSASGFTFSSYAMHWVRQAPGKGLEYVSAISSNGGSTYYADSVKGRFTISRDNSKNTLYLQMSSLRAEDTAVYYCV

SEQ ID NO: 221 - protein, 94 aa, Homo sapiens
DIQMTQSPSSLSASVGDRVTITCRASQSISISLKWYQQKPGKAPKLLIYAASSLQSGVPSRFSGSGSGTDFTLTISSLQPEDFATYYCQQSYST

SEQ ID NO: 222 - protein, 98 aa, Homo sapiens
QVQLVESGGGVVQPGRSLRLSCAASGFTFSTYGMHWVRQAPGKGLEWVAVIWYDGSNKYYADSVKGRFTISRDNSKNTLYLQMNSLRAEDTAVYYCAR

SEQ ID NO: 223 - protein, 98 aa, Homo sapiens
EVQLVESGGGLVKPGGSLRLSCAASGFTFSSYSMNWVRQAPGKGLEWVSSISSSSSYIYYADSVKGRFTISRDNAKNSLYLQMNSLRAEDTAVYYCAR

SEQ ID NO: 224 - protein, 94 aa, Homo sapiens
EIVMTQSPATLSVSPGERATLSCRASQSVSSNLAWYQQKPGQAPRLLIYGASTRATGIPARFSGSGSGTEFTLTISSLQSEDFAVYYCQQYNNW

SEQ ID NO: 225 - protein, 98 aa, Homo sapiens; identical to SEQ ID NO: 222

SEQ ID NO: 226 - protein, 94 aa, Homo sapiens
DIQMTQSPSSLSASVGDRVTITCRASQSISISLNWYQQKPGKAPKLLIYAASSLQSGVPSRFSGSGSGTDFTLTISSLQPEDFATYYCQQSYST

SEQ ID NO: 227 - protein, 97 aa, Homo sapiens
QVQLQESGPGLVKPSDTLFLTCAVSGYSIDSGHWWGWIRQPPGTGLEYIGYTYYSGSTYANPSLRSRITMSLDTSKNQFSLKVSSVTAVDTAVYYCA

SEQ ID NO: 228 - protein, 93 aa, Homo sapiens
DIQMTQSPSTLSASVGDRVTITCRASQSISNWLAWYQQKPGKAPKLLIYKASTLQSGVPSRFSGSGSGTEFTLTINSLQPDDFATYYCQQYNS

SEQ ID NO: 229 - protein, 95 aa, Homo sapiens
EIVMTQSPATLSVSPGERATLSCRASQSVSSNLAWYQNKPGQAPRLLIYGASTRATGVPARFSGSGSGTEFTLSISSLQSEDFAVYYCQHYNDWP

SEQ ID NO: 230 - protein, 98 aa, Homo sapiens
EVQLVESGGGLVKPGGSLRLSCSASGFTFNIYAMNWVRQVPGKGLDWVSSISSRGDYIYYAESVEGRFTISRDNAKNSLYLEMNSLRAEDTAVYYCAR

SEQ ID NO: 231 - protein, 94 aa, Homo sapiens
DIQMTQSPSSLSASVGDRVTISCQASQDITNFLNWYQQKSGEAPKLLIYDASDLETGVPSRFSGSGSGTDFTFTISRLQPEDTATYYCQQYDDL

SEQ ID NO: 232 - protein, 25 aa, Homo sapiens
EVQLVESGGGLVKPGGSLRLSCTAS

SEQ ID NO: 233 - protein, 26 aa, Homo sapiens
EIVMTQSPATLSVSPGERATLSCRAS

SEQ ID NO: 234 - protein, 25 aa, Homo sapiens
EVQLVESGGGLVKPEGSLRLSCEAS

SEQ ID NO: 235 - protein, 26 aa, Homo sapiens
DIQLTQSPSFLSAFVGDRVTITCRAS

SEQ ID NO: 236 - protein, 25 aa, Homo sapiens
QVQLVESGGGVVQPGRSLRLSCAAS

SEQ ID NO: 237 - protein, 26 aa, Homo sapiens
DIQMTQSPSTLSASVGDRVTITCRAS

SEQ ID NO: 238 - protein, 24 aa, Homo sapiens
VQLVESGGGLVEPGGSLRLSCAAS

SEQ ID NO: 239 - protein, 26 aa, Homo sapiens [sequence omitted]

SEQ ID NO: 240 - protein, 25 aa, Homo sapiens
EVQLVESGGGWVQPGGSLRLSCEAS

SEQ ID NO: 241 - protein, 24 aa, Homo sapiens
VMTQSPLSLPVTLGQPASISCRSS

SEQ ID NO: 242 - protein, 25 aa, Homo sapiens
QVQLVESGGGLVKPGGSLRLSCAAS

SEQ ID NO: 243 - protein, 26 aa, Homo sapiens
DIQLTQSPSFLSASVGDRVTITCRAN

SEQ ID NO: 244 - protein, 25 aa, Homo sapiens
EVQLLESGGGLVQPGGSLRLSCAAS

SEQ ID NO: 245 - protein, 26 aa, Homo sapiens [sequence omitted]

SEQ ID NO: 246 - protein, 25 aa, Homo sapiens
EVQLLESGGDLVQPGGSLRLSCVVS

SEQ ID NO: 247 - protein, 26 aa, Homo sapiens [sequence omitted]

SEQ ID NO: 248 - protein, 25 aa, Homo sapiens
QVQLQESGPGLVKPSGTLSLTCAVS

SEQ ID NO: 249 - protein, 26 aa, Homo sapiens [sequence omitted]

SEQ ID NO: 250 - protein, 25 aa, Homo sapiens
EVQLVQSGVEVKKPGESLKISCKGS

SEQ ID NO: 251 - protein, 26 aa, Homo sapiens [sequence omitted]

SEQ ID NO: 252 - protein, 25 aa, Homo sapiens
QVQLQESGPGLVKPSGTLSLTCAVS

SEQ ID NO: 253 - protein, 26 aa, Homo sapiens [sequence omitted]

SEQ ID NO: 254 - protein, 25 aa, Homo sapiens
QVQLVQSGSELKKPGASVKVSCKAS

SEQ ID NO: 255 - protein, 26 aa, Homo sapiens
DIQMTQSPSTLSASVGDRVSITCRAS

SEQ ID NO: 256 - protein, 25 aa, Homo sapiens
QVQLVQSGSELKKPGASVKVSCKAS

SEQ ID NO: 257 - protein, 26 aa, Homo sapiens
DIQMTQSPSTLSASVGDRVTITCRAS

SEQ ID NO: 258 - protein, 25 aa, Homo sapiens
QVQLVQSGSEVKRPGASVQVSCKTS

SEQ ID NO: 259 - protein, 26 aa, Homo sapiens
DVVMTQSPLALPVTLGQSASISCRSS

SEQ ID NO: 260 - protein, 25 aa, Homo sapiens [sequence omitted]

SEQ ID NO: 261 - protein, 26 aa, Homo sapiens [sequence omitted]

SEQ ID NO: 262 - protein, 26 aa, Homo sapiens
DIVMTQSPLSLPVTPGEPASISCRSS

SEQ ID NO: 263 - protein, 25 aa, Homo sapiens
QVQLQESGPGLVKPSQTLSLTCTVS

SEQ ID NO: 264 - protein, 26 aa, Homo sapiens
DIVMTQSPDSLAVPLGERATINCKSS

SEQ ID NO: 265 - protein, 25 aa, Homo sapiens
QVQLQESGPGLVKPSETLSLTCSVS

SEQ ID NO: 266 - protein, 26 aa, Homo sapiens
EIVMTQSPATLSVSPGERATLSCRAS

SEQ ID NO: 267 - protein, 25 aa, Homo sapiens
QVQLVQSGTEVKKPESSVKVSCEAS

SEQ ID NO: 268 - protein, 26 aa, Homo sapiens
DIQMTQSPSSLSASVGDRVTFTCQAS

SEQ ID NO: 269 - protein, 25 aa, Homo sapiens
QVQLVQSGAELKKPGSSVKVSCKTS

SEQ ID NO: 270 - protein, 26 aa, Homo sapiens
DIQMTQSPSTLSASVGDRVTIACRAS

SEQ ID NO: 271 - protein, 25 aa, Homo sapiens
RLQLQESGPGLVKPSETLSLTCTAS

SEQ ID NO: 272 - protein, 26 aa, Homo sapiens
EIVMTQSPATVSVSPGERATLSCRAS

SEQ ID NO: 273 - protein, 25 aa, Homo sapiens [sequence omitted]

SEQ ID NO: 274 - protein, 26 aa, Homo sapiens
EIVMTQSPATLSVSPGERATLSCRAS

SEQ ID NO: 275 - protein, 25 aa, Homo sapiens
QVQLQESGPGLVKPSETLSLTCAVS

SEQ ID NO: 276 - protein, 26 aa, Homo sapiens
DIVMTQTPLSSPVTLGQPASISCRSS

SEQ ID NO: 277 - protein, 25 aa, Homo sapiens
QVQLVQSGAEVKKPGASVKVSCQAS

SEQ ID NO: 278 - protein, 26 aa, Homo sapiens [sequence omitted]

SEQ ID NO: 279 - protein, 25 aa, Homo sapiens [sequence omitted]

SEQ ID NO: 280 - protein, 26 aa, Homo sapiens
DIQMTQSPSSLSASVGDRITITCRAS

SEQ ID NO: 281 - protein, 25 aa, Homo sapiens [sequence omitted]

SEQ ID NO: 282 - protein, 26 aa, Homo sapiens
DIQMTQSPSTLSASVGDRVTITCRAS

SEQ ID NO: 283 - protein, 25 aa, Homo sapiens
QVQLQESGPGLVKPSQTLSLTCTVS

SEQ ID NO: 284 - protein, 26 aa, Homo sapiens
DIQMTQSPSSLSASVGDRVTITCRAG

SEQ ID NO: 285 - protein, 25 aa, Homo sapiens [sequence omitted]

SEQ ID NO: 286 - protein, 26 aa, Homo sapiens
DIVMTQSPDSLAVSLGERATINCKSS

SEQ ID NO: 287 - protein, 25 aa, Homo sapiens
QVQLQESGPGLVKPSETLSLTCTVS

SEQ ID NO: 288 - protein, 26 aa, Homo sapiens [sequence omitted]

SEQ ID NO: 289 - protein, 25 aa, Homo sapiens
QVQLVQSGAEVKRPGASVRIACKAS

SEQ ID NO: 290 - protein, 26 aa, Homo sapiens [sequence omitted]

SEQ ID NO: 291 - protein, 25 aa, Homo sapiens
QVQLVQSGAEVKKPGSSVKVSCRAS

SEQ ID NO: 292 - protein, 26 aa, Homo sapiens [sequence omitted]

SEQ ID NO: 293 - protein, 25 aa, Homo sapiens
QVQLVQSGTEVKKPGSSVRISCEAS

SEQ ID NO: 294 - protein, 26 aa, Homo sapiens
DIVMTQSPLSLPATPGESASISCRSS

SEQ ID NO: 295 - protein, 25 aa, Homo sapiens [sequence omitted]

SEQ ID NO: 296 - protein, 26 aa, Homo sapiens
EIVLTQSPGTLSLSPGDRATLSCRAS

SEQ ID NO: 297 - protein, 25 aa, Homo sapiens [sequence omitted]

SEQ ID NO: 298 - protein, 26 aa, Homo sapiens
EIVMTQSPATLSVSPGERATLSCRAS

SEQ ID NO: 299 - protein, 25 aa, Homo sapiens
EVQLLESGGGLVQPGGSLRLSCAAS

SEQ ID NO: 300 - protein, 26 aa, Homo sapiens
DIVMTQSPLSLPVTPGEPASISCRSS

SEQ ID NO: 301 - protein, 25 aa, Homo sapiens
EVQLVESGGGLVKPGGSLRLSCAAS

SEQ ID NO: 302 - protein, 26 aa, Homo sapiens [sequence omitted]

SEQ ID NO: 303 - protein, 25 aa, Homo sapiens
EVQLVQSGAEVKKPGGSLKISCKTS

SEQ ID NO: 304 - protein, 26 aa, Homo sapiens [sequence omitted]

SEQ ID NO: 305 - protein, 25 aa, Homo sapiens
EVQLLESGGGLVQPGGSLRLSCEAS

SEQ ID NO: 306 - protein, 26 aa, Homo sapiens
DIVMTQSPDSLAVSLGETATINCRSS

SEQ ID NO: 307 - protein, 25 aa, Homo sapiens
QVQLVQSGAEVKMPGSSVKVSCRAS

SEQ ID NO: 308 - protein, 26 aa, Homo sapiens
EIVLTQSPATLSLSAGERATLSCRAS

SEQ ID NO: 309 - protein, 25 aa, Homo sapiens [sequence omitted]

SEQ ID NO: 310 - protein, 26 aa, Homo sapiens
EIVMTQSPATLSVSPGERATLSCRAS

SEQ ID NO: 311 - protein, 25 aa, Homo sapiens
EVQLVESGGGLVQPGGSLRLSCSAS

SEQ ID NO: 312 - protein, 26 aa, Homo sapiens [sequence omitted]

SEQ ID NO: 313 - protein, 25 aa, Homo sapiens
QVQLVESGGGVVQPGRSLRLSCAAS

SEQ ID NO: 314 - protein, 25 aa, Homo sapiens
EVQLVESGGGLVKPGGSLRLSCAAS

SEQ ID NO: 315 - protein, 26 aa, Homo sapiens
EIVMTQSPATLSVSPGERATLSCRAS

SEQ ID NO: 316 - protein, 25 aa, Homo sapiens
QVQLVESGGGVVQPGRSLRLSCAAS

SEQ ID NO: 317 - protein, 26 aa, Homo sapiens [sequence omitted]

SEQ ID NO: 318 - protein, 25 aa, Homo sapiens
QVQLQESGPGLVKPSDTLFLTCAVS

SEQ ID NO: 319 - protein, 26 aa, Homo sapiens
DIQMTQSPSTLSASVGDRVTITCRAS

SEQ ID NO: 320 - protein, 26 aa, Homo sapiens
EIVMTQSPATLSVSPGERATLSCRAS

SEQ ID NO: 321 - protein, 25 aa, Homo sapiens
EVQLVESGGGLVKPGGSLRLSCSAS

SEQ ID NO: 322 - protein, 26 aa, Homo sapiens
DIQMTQSPSSLSASVGDRVTISCQAS

SEQ ID NO: 323 - protein, 8 aa, Homo sapiens
GFNFNNHG

SEQ ID NO: 324 - protein, 6 aa, Homo sapiens
QSVSSY

SEQ ID NO: 325 - protein, 8 aa, Homo sapiens
GFIIDTYS

SEQ ID NO: 326 - protein, 6 aa, Homo sapiens
QGISNY

SEQ ID NO: 327 - protein, 8 aa, Homo sapiens
GFTFSNFG

SEQ ID NO: 328 - protein, 6 aa, Homo sapiens
QNINTW

SEQ ID NO: 329 - protein, 8 aa, Homo sapiens
GFTFSDYQ

SEQ ID NO: 330 - protein, 7 aa, Homo sapiens
QSVTGGF

SEQ ID NO: 331 - protein, 8 aa, Homo sapiens
GFTFSLFW

SEQ ID NO: 332 - protein, 11 aa, Homo sapiens
QGLVSSDGSTY

SEQ ID NO: 333 - protein, 8 aa, Homo sapiens
GFTFSGYY

SEQ ID NO: 334 - protein, 6 aa, Homo sapiens
QGISSS

SEQ ID NO: 335 - protein, 8 aa, Homo sapiens
GLNFISYA

SEQ ID NO: 336 - protein, 6 aa, Homo sapiens
QSVRFY

SEQ ID NO: 337 - protein, 8 aa, Homo sapiens
GYTFDYSA

SEQ ID NO: 338 - protein, 6 aa, Homo sapiens
QSVSHY

SEQ ID NO: 339 - protein, 9 aa, Homo sapiens
GVSISMINW

SEQ ID NO: 340 - protein, 7 aa, Homo sapiens
QSISNNY

SEQ ID NO: 341 - protein, 8 aa, Homo sapiens
GYSFTNYW

SEQ ID NO: 342 - protein, 12 aa, Homo sapiens
QNVLHSSKNKNY

SEQ ID NO: 343 - protein, 9 aa, Homo sapiens
GASISSTNW

SEQ ID NO: 344 - protein, 6 aa, Homo sapiens
QSVSSY

SEQ ID NO: 345 - protein, 8 aa, Homo sapiens
GYTFTTYS

SEQ ID NO: 346 - protein, 6 aa, Homo sapiens
QTISTW

SEQ ID NO: 347 - protein, 8 aa, Homo sapiens
GYTFTSYA

SEQ ID NO: 348 - protein, 6 aa, Homo sapiens
QTIISW

SEQ ID NO: 349 - protein, 8 aa, Homo sapiens
GYTFSDYG

SEQ ID NO: 350 - protein, 11 aa, Homo sapiens
QSLVDRDGNIY

SEQ ID NO: 351 - protein, 8 aa, Homo sapiens
GGSFGGYY

SEQ ID NO: 352 - protein, 6 aa, Homo sapiens
QSVSSY

SEQ ID NO: 353 - protein, 11 aa, Homo sapiens
QSLLHSSGYNY

SEQ ID NO: 354 - protein, 10 aa, Homo sapiens
GASINSGGYY

SEQ ID NO: 355 - protein, 12 aa, Homo sapiens
QSVSYSSTNKNC

SEQ ID NO: 356 - protein, 10 aa, Homo sapiens
GGSVSSGIYH

SEQ ID NO: 357 - protein, 6 aa, Homo sapiens
KSISSN

SEQ ID NO: 358 - protein, 8 aa, Homo sapiens
GGPFGSYA

SEQ ID NO: 359 - protein, 6 aa, Homo sapiens
QDISNS

SEQ ID NO: 360 - protein, 8 aa, Homo sapiens
GGTSNNYP

SEQ ID NO: 361 - protein, 6 aa, Homo sapiens
QSISDW

SEQ ID NO: 362 - protein, 10 aa, Homo sapiens
GGSVNSGGYY

SEQ ID NO: 363 - protein, 6 aa, Homo sapiens
QSVTNN

SEQ ID NO: 364 - protein, 8 aa, Homo sapiens
GFTFDDYA

SEQ ID NO: 365 - protein, 6 aa, Homo sapiens
EGISSH

SEQ ID NO: 366 - protein, 9 aa, Homo sapiens
GYSISSGYY

SEQ ID NO: 367 - protein, 11 aa, Homo sapiens
QSLVHSDGNTY

SEQ ID NO: 368 - protein, 8 aa, Homo sapiens
GYTFSSYG

SEQ ID NO: 369 - protein, 7 aa, Homo sapiens
QSISSSY

SEQ ID NO: 370 - protein, 10 aa, Homo sapiens
GDSINSGGYY

SEQ ID NO: 371 - protein, 6 aa, Homo sapiens
QGIRNY

SEQ ID NO: 372 - protein, 8 aa, Homo sapiens
GMTSNSLA

SEQ ID NO: 373 - protein, 6 aa, Homo sapiens
QTITTW

SEQ ID NO: 374 - protein, 10 aa, Homo sapiens
GASISSGDSY

SEQ ID NO: 375 - protein, 6 aa, Homo sapiens
QNVRDY

SEQ ID NO: 376 - protein, 8 aa, Homo sapiens
GGSFSTYA

SEQ ID NO: 377 - protein, 12 aa, Homo sapiens
QSVLFSSNNKHY

SEQ ID NO: 378 - protein, 8 aa, Homo sapiens
GDSIRNYY

SEQ ID NO: 379 - protein, 6 aa, Homo sapiens
QTIKKY

SEQ ID NO: 380 - protein, 8 aa, Homo sapiens
GDTLTSFG

SEQ ID NO: 381 - protein, 6 aa, Homo sapiens
RGIADY

SEQ ID NO: 382 - protein, 8 aa, Homo sapiens
GGIFRSNA

SEQ ID NO: 383 - protein, 7 aa, Homo sapiens
QSVSSNY

SEQ ID NO: 384 - protein, 8 aa, Homo sapiens
GATFSSLG

SEQ ID NO: 385 - protein, 11 aa, Homo sapiens
QILLHGNGNNY

SEQ ID NO: 386 - protein, 8 aa, Homo sapiens
GGTFGSYG

SEQ ID NO: 387 - protein, 7 aa, Homo sapiens
QRVSNNF

SEQ ID NO: 388 - protein, 8 aa, Homo sapiens
GGTFRNFA

SEQ ID NO: 389 - protein, 6 aa, Homo sapiens
QSVSSN

SEQ ID NO: 390 - protein, 8 aa, Homo sapiens
GFTFSSYA

SEQ ID NO: 391 - protein, 11 aa, Homo sapiens
QSLLHTNGYSY

SEQ ID NO: 392 - protein, 8 aa, Homo sapiens
GFYFSDYG

SEQ ID NO: 393 - protein, 7 aa, Homo sapiens
QTVSSTF

SEQ ID NO: 394 - protein, 8 aa, Homo sapiens
GYSFNTYW

SEQ ID NO: 395 - protein, 7 aa, Homo sapiens
QTVSGSF

SEQ ID NO: 396 - protein, 8 aa, Homo sapiens
GFTFTSFG

SEQ ID NO: 397 - protein, 12 aa, Homo sapiens
QSVLYPSNSRNY

SEQ ID NO: 398 - protein, 8 aa, Homo sapiens
GGTFSTYT

SEQ ID NO: 399 - protein, 6 aa, Homo sapiens
QSVSSY

SEQ ID NO: 400 - protein, 8 aa, Homo sapiens
GFRFEDYA

SEQ ID NO: 401 - protein, 6 aa, Homo sapiens
QSASNN

SEQ ID NO: 402 - protein, 8 aa, Homo sapiens
GFTFSSYA

SEQ ID NO: 403 - protein, 6 aa, Homo sapiens
QSISIS

SEQ ID NO: 404 - protein, 8 aa, Homo sapiens
GFTFSTYG

SEQ ID NO: 405 - protein, 8 aa, Homo sapiens
GFTFSSYS

SEQ ID NO: 406 - protein, 6 aa, Homo sapiens
QSVSSN

SEQ ID NO: 407 - protein, 8 aa, Homo sapiens
GFTFSTYG

SEQ ID NO: 408 - protein, 6 aa, Homo sapiens
QSISIS

SEQ ID NO: 409 - protein, 9 aa, Homo sapiens
GYSIDSGHW

SEQ ID NO: 410 - protein, 6 aa, Homo sapiens
QSISNW

SEQ ID NO: 411 - protein, 6 aa, Homo sapiens
QSVSSN

SEQ ID NO: 412 - protein, 8 aa, Homo sapiens
GFTFNIYA

SEQ ID NO: 413 - protein, 6 aa, Homo sapiens
QDITNF

SEQ ID NO: 414 - protein, 17 aa, Homo sapiens
MNWLRQAPGKGLEWVAS

SEQ ID NO: 415 - protein, 17 aa, Homo sapiens
LAWYQQKPGQAPRLLIY

SEQ ID NO: 416 - protein, 17 aa, Homo sapiens
MNWVRQAPGKGLEWVST

SEQ ID NO: 417 - protein, 17 aa, Homo sapiens
FAWYQQKPGTAPKLLIH

SEQ ID NO: 418 - protein, 17 aa, Homo sapiens
MYWVRQAPGKGLDWVAV

SEQ ID NO: 419 - protein, 17 aa, Homo sapiens
LAWYQQKPGEAPNLLIF

SEQ ID NO: 420 - protein, 17 aa, Homo sapiens
MSWIRQAPGKGLEWLSD

SEQ ID NO: 421 - protein, 17 aa, Homo sapiens
LAWYQQKPGQAPRLLIY

SEQ ID NO: 422 - protein, 17 aa, Homo sapiens
MGWVRQAPGKGLEWVAT

SEQ ID NO: 423 - protein, 17 aa, Homo sapiens
LSWYQQRPGQSPRRLFY

SEQ ID NO: 424 - protein, 17 aa, Homo sapiens
MSWVRQAPGKGLEWVSY

SEQ ID NO: 425 - protein, 17 aa, Homo sapiens
LAWYQQRPGKAPKLLIY

SEQ ID NO: 426 - protein, 17 aa, Homo sapiens
MSWVRQAPGRGLEWVSV

SEQ ID NO: 427 - protein, 17 aa, Homo sapiens
LAWYQQKPGQAPRLLIY

SEQ ID NO: 428 - protein, 17 aa, Homo sapiens
MNWVRQAPGKGLEWVST

SEQ ID NO: 429 - protein, 17 aa, Homo sapiens
LAWFQQKPGQPPRLLIY

SEQ ID NO: 430 - protein, 17 aa, Homo sapiens
WTWVRQPPGKGLEWIGE

SEQ ID NO: 431 - protein, 17 aa, Homo sapiens
LAWYQQKPGQAPRLLIY

SEQ ID NO: 432 - protein, 17 aa, Homo sapiens
IGWVRQVPGKGLEWMGS

SEQ ID NO: 433 - protein, 17 aa, Homo sapiens
LGWYQHKPGQPPKLLIY

SEQ ID NO: 434 - protein, 17 aa, Homo sapiens
WSWVRQPPGKGLEWIGE

SEQ ID NO: 435 - protein, 17 aa, Homo sapiens
LAWYQQKPGQAPRLLIY

SEQ ID NO: 436 - protein, 17 aa, Homo sapiens
MNWVRQAPGQGLEWMGW

SEQ ID NO: 437 - protein, 17 aa, Homo sapiens
LAWYQQKPGKAPKLLIY

SEQ ID NO: 438 - protein, 17 aa, Homo sapiens
MNWVRQAPGQGLEWMGW

SEQ ID NO: 439 - protein, 17 aa, Homo sapiens
LAWYQQKPGKAPKLLIY

SEQ ID NO: 440 - protein, 17 aa, Homo sapiens
MSWVRQAPGQGLEWMGW

SEQ ID NO: 441 - protein, 17 aa, Homo sapiens
LIWFHQRPGQSPRRLIY

SEQ ID NO: 442 - protein, 17 aa, Homo sapiens
WNWIRQPPGKGLEWIGE

SEQ ID NO: 443 - protein, 17 aa, Homo sapiens
LAWYQQKPGQAPRLLIY

SEQ ID NO: 444 - protein, 17 aa, Homo sapiens
LDWYLQKPGQSPQVLIY

SEQ ID NO: 445 - protein, 17 aa, Homo sapiens
WSWIRQHPGKGLEWIGY

SEQ ID NO: 446 - protein, 17 aa, Homo sapiens
LAWYQQKSGQPPKLLIY

SEQ ID NO: 447 - protein, 17 aa, Homo sapiens
WTWIRQPPGKGLEWIGY

SEQ ID NO: 448 - protein, 17 aa, Homo sapiens
LAWYQQEPGQAPRLLIY

SEQ ID NO: 449 - protein, 17 aa, Homo sapiens
VSWVRQAPGQRLEWIGG

SEQ ID NO: 450 - protein, 17 aa, Homo sapiens
LNWYQQKPGKAPNILIY

SEQ ID NO: 451 - protein, 17 aa, Homo sapiens
ISWVRQAPGQGLEWMGG

SEQ ID NO: 452 - protein, 17 aa, Homo sapiens
LAWYQQKPGKAPKLLIH

SEQ ID NO: 453 - protein, 17 aa, Homo sapiens
WGWIRQPPGKGPEWIGT

SEQ ID NO: 454 - protein, 17 aa, Homo sapiens
VAWYQQKPGQAPRLLIY

SEQ ID NO: 455 - protein, 17 aa, Homo sapiens
MTWVRQAPGKGLEWVSG

SEQ ID NO: 456 - protein, 17 aa, Homo sapiens
LAWYQQRPGQAPRLLIY

SEQ ID NO: 457 - protein, 17 aa, Homo sapiens
WGWIRQPPGKGLEWIGS

SEQ ID NO: 458 - protein, 17 aa, Homo sapiens
LSWLQQRPGQPPRLLIY

SEQ ID NO: 459 - protein, 17 aa, Homo sapiens
ISWVRQAPGQGLEWMGW

SEQ ID NO: 460 - protein, 17 aa, Homo sapiens
LAWYQRKPGQAPRLLIY

SEQ ID NO: 461 - protein, 17 aa, Homo sapiens
WNWIRQPPGKGLEWIGY

SEQ ID NO: 462 - protein, 17 aa, Homo sapiens
VAWYQQKPGRVPKLLIY

SEQ ID NO: 463 - protein, 17 aa, Homo sapiens
ISWVRQAPGQGLEWMGG

SEQ ID NO: 464 - protein, 17 aa, Homo sapiens
LAWYQQKPGQAPKLLIH

SEQ ID NO: 465 - protein, 17 aa, Homo sapiens
WSWIRQPPGKGLEWIGY

SEQ ID NO: 466 - protein, 17 aa, Homo sapiens
LNWYQQKPGKAPKLLIY

SEQ ID NO: 467 - protein, 17 aa, Homo sapiens
INWVRQAPGQGLEWMGG

SEQ ID NO: 468 - protein, 17 aa, Homo sapiens
LAWFQQKPGQPPKLLIY

SEQ ID NO: 469 - protein, 17 aa, Homo sapiens
WSWIRQAPGKGLESIGY

SEQ ID NO: 470 - protein, 17 aa, Homo sapiens
LNWYQQEPGKAPKLLIY

SEQ ID NO: 471 - protein, 17 aa, Homo sapiens
FSWVRQARGQGLEWMGW

SEQ ID NO: 472 - protein, 17 aa, Homo sapiens
LAWYQQKPGKVPQLLIY

SEQ ID NO: 473 - protein, 17 aa, Homo sapiens
ISWVRQAPGQGLEWMGE

SEQ ID NO: 474 - protein, 17 aa, Homo sapiens
LAWYQQKPGQAPRLLIY

SEQ ID NO: 475 - protein, 17 aa, Homo sapiens
INWFRLGPGQGLEWMGA

SEQ ID NO: 476 - protein, 17 aa, Homo sapiens
LDWYVQKPGQSPQLLIY

SEQ ID NO: 477 - protein, 17 aa, Homo sapiens
INWVRQAPGQGLEWMGG

SEQ ID NO: 478 - protein, 17 aa, Homo sapiens
LAWYQQKPGLAPRLLFY

SEQ ID NO: 479 - protein, 17 aa, Homo sapiens
VSWVRQAPGQGPEWMGG

SEQ ID NO: 480 - protein, 17 aa, Homo sapiens
LAWYQQTPGQAPRLLIY

SEQ ID NO: 481 - protein, 17 aa, Homo sapiens
MSWVRQAPGKGLEWVSA

SEQ ID NO: 482 - protein, 17 aa, Homo sapiens
VDWYLQKPGQSPQLLIY

SEQ ID NO: 483 - protein, 17 aa, Homo sapiens
MNWVRQSAGRGLEWISY

SEQ ID NO: 484 - protein, 17 aa, Homo sapiens
LAWYQQKPGQAPRLLIF

SEQ ID NO: 485 - protein, 17 aa, Homo sapiens
IGWVRQVPGKGLEWMGM

SEQ ID NO: 486 - protein, 17 aa, Homo sapiens
LAWYQQKPGQAPRLLIY

SEQ ID NO: 487 - protein, 17 aa, Homo sapiens
MNWVRQAPGKGLEWVAV

SEQ ID NO: 488 - protein, 17 aa, Homo sapiens
LAWYQQKPGQPPKLLIY

SEQ ID NO: 489 - protein, 17 aa, Homo sapiens
ITWVRQAPGQGLEWMGV

SEQ ID NO: 490 - protein, 17 aa, Homo sapiens
LAWYQQKPGQAPRLLIF

SEQ ID NO: 491 - protein, 17 aa, Homo sapiens
MHWVRQAPGKGLEWVSG

SEQ ID NO: 492 - protein, 17 aa, Homo sapiens
LAWYQQKPGQTPRLLIY

SEQ ID NO: 493 - protein, 17 aa, Homo sapiens
MHWVRQAPGKGLEYVSA

SEQ ID NO: 494 - protein, 17 aa, Homo sapiens
LKWYQQKPGKAPKLLIY

SEQ ID NO: 495 - protein, 17 aa, Homo sapiens
MHWVRQAPGKGLEWVAV

SEQ ID NO: 496 - protein, 17 aa, Homo sapiens
MNWVRQAPGKGLEWVSS

SEQ ID NO: 497 - protein, 17 aa, Homo sapiens
LAWYQQKPGQAPRLLIY

SEQ ID NO: 498 - protein, 17 aa, Homo sapiens
MHWVRQAPGKGLEWVAV

SEQ ID NO: 499 - protein, 17 aa, Homo sapiens
LNWYQQKPGKAPKLLIY

SEQ ID NO: 500 - protein, 17 aa, Homo sapiens
WGWIRQPPGTGLEYIGY

SEQ ID NO: 501 - protein, 17 aa, Homo sapiens
LAWYQQKPGKAPKLLIY

SEQ ID NO: 502 - protein, 17 aa, Homo sapiens
LAWYQNKPGQAPRLLIY

SEQ ID NO: 503 - protein, 17 aa, Homo sapiens
MNWVRQVPGKGLDWVSS

SEQ ID NO: 504 - protein, 17 aa, Homo sapiens
LNWYQQKSGEAPKLLIY

SEQ ID NO: 505 - protein, 8 aa, Homo sapiens
ISSGSRSH

SEQ ID NO: 506 - protein, 8 aa, Homo sapiens
ISSTSNYI

SEQ ID NO: 507 - protein, 8 aa, Homo sapiens
ISYDGSNT

SEQ ID NO: 508 - protein, 8 aa, Homo sapiens
ITSTGNAK

SEQ ID NO: 509 - protein, 8 aa, Homo sapiens
MKQDGSEY

SEQ ID NO: 510 - protein, 8 aa, Homo sapiens
ISHRGNMI

SEQ ID NO: 511 - protein, 8 aa, Homo sapiens
VSGTGGTT

SEQ ID NO: 512 - protein, 8 aa, Homo sapiens
IFGADAHT

SEQ ID NO: 513 - protein, 7 aa, Homo sapiens
IYHNGST

SEQ ID NO: 514 - protein, 8 aa, Homo sapiens
IYSGGSTT

SEQ ID NO: 515 - protein, 7 aa, Homo sapiens
IYHNGST

SEQ ID NO: 516 - protein, 8 aa, Homo sapiens
INTYTGNP

SEQ ID NO: 517 - protein, 8 aa, Homo sapiens
INTYTGNP

SEQ ID NO: 518 - protein, 8 aa, Homo sapiens
INVNVGNT

SEQ ID NO: 519 - protein, 7 aa, Homo sapiens
INHSGST

SEQ ID NO: 520 - protein, 7 aa, Homo sapiens
IYFTGRT

SEQ ID NO: 521 - protein, 7 aa, Homo sapiens
IYYSGST

SEQ ID NO: 522 - protein, 8 aa, Homo sapiens
IIPIFGTP

SEQ ID NO: 523 - protein, 8 aa, Homo sapiens
SIPIFNTP

SEQ ID NO: 524 - protein, 7 aa, Homo sapiens
IYNSGSV

SEQ ID NO: 525 - protein, 8 aa, Homo sapiens
ISWDSGAI

SEQ ID NO: 526 - protein, 7 aa, Homo sapiens
IYYSGST

SEQ ID NO: 527 - protein, 8 aa, Homo sapiens
ISAYSGNT

SEQ ID NO: 528 - protein, 7 aa, Homo sapiens
IYFTGRT

SEQ ID NO: 529 - protein, 8 aa, Homo sapiens
IIPVFETP

SEQ ID NO: 530 - protein, 7 aa, Homo sapiens
ISNSGST

SEQ ID NO: 531 - protein, 8 aa, Homo sapiens
IIPVVGRA

SEQ ID NO: 532 - protein, 7 aa, Homo sapiens
IYYSGRA

SEQ ID NO: 533 - protein, 8 aa, Homo sapiens
INGYNSNP

SEQ ID NO: 534 - protein, 8 aa, Homo sapiens
IIAVFGTA

SEQ ID NO: 535 - protein, 8 aa, Homo sapiens
PIPLSGTP

SEQ ID NO: 536 - protein, 8 aa, Homo sapiens
ITPIDGIP

SEQ ID NO: 537 - protein, 8 aa, Homo sapiens
IIAIFGTA

SEQ ID NO: 538 - protein, 8 aa, Homo sapiens
ISGSGGST

SEQ ID NO: 539 - protein, 8 aa, Homo sapiens
IASSGSNI

SEQ ID NO: 540 - protein, 8 aa, Homo sapiens
IYPGDSDT

SEQ ID NO: 541 - protein, 8 aa, Homo sapiens
ISGSDGST

SEQ ID NO: 542 - protein, 8 aa, Homo sapiens
IYPVFGSA

SEQ ID NO: 543 - protein, 8 aa, Homo sapiens
ISWNSGAI

SEQ ID NO: 544 - protein, 8 aa, Homo sapiens
ISSNGGST

SEQ ID NO: 545 - protein, 8 aa, Homo sapiens
IWYDGSNK

SEQ ID NO: 546 - protein, 8 aa, Homo sapiens
ISSSSSYI

SEQ ID NO: 547 - protein, 8 aa, Homo sapiens
IWYDGSNK

SEQ ID NO: 548 - protein, 7 aa, Homo sapiens
TYYSGST

SEQ ID NO: 549 - protein, 8 aa, Homo sapiens
ISSRGDYI

SEQ ID NO: 550 - protein, 38 aa, Homo sapiens
FYADSLEGRFTVSRDNAKNSLFLQMNSLRAEDTAVYYC

SEQ ID NO: 551 - protein, 36 aa, Homo sapiens
TRATGIPARFSGSGSGTEFTLTISGLQSEDFAVYYC

SEQ ID NO: 552 - protein, 38 aa, Homo sapiens
YYADSVKGRFTISRDNAKNSVFLQMNSLRVEDTAIYYC

SEQ ID NO: 553 - protein, 36 aa, Homo sapiens
TLQSGVPSRFSGSGSGTVFTLTISSLQPEDFATYYC

SEQ ID NO: 554 - protein, 38 aa, Homo sapiens
YYADSVKGRFTISRDNSKNTLSLQLNSLKPVDTAVYYC

SEQ ID NO: 555 - protein, 36 aa, Homo sapiens
ILESGGPSRFSGSGSGTEFTLTISSLQPDDFATYYC

SEQ ID NO: 556 - protein, 38 aa, Homo sapiens
YHADSVKGRFTVSRDNAKRSLYLQMNSLRAEDTAVYFC

SEQ ID NO: 557 - protein, 36 aa, Homo sapiens [sequence omitted]

SEQ ID NO: 558 - protein, 38 aa, Homo sapiens
YYVDSVKGRFTISRDNPKNSLYLQMNSLRAEDTAVYYC

SEQ ID NO: 559 - protein, 36 aa, Homo sapiens
ARDSGVPDRFSASGSGTDFTLKISRVEAEDVGVYYC

SEQ ID NO: 560 - protein, 38 aa, Homo sapiens
HYQDSMKGRFIISRDNANNSLYLQMNSLRAEDTAVYYC

SEQ ID NO: 561 - protein, 36 aa, Homo sapiens
TLQSGVPSRFSGSGSGTEFTLTISSLQPEDFASYYC

SEQ ID NO: 562 - protein, 38 aa, Homo sapiens
FYGDSVQGRFTISRDNSKNMLYLQMDSLRAEDTAKYFC

SEQ ID NO: 563 - protein, 36 aa, Homo sapiens
TRATGIPARFSGSGSGTDFSLTISSLETEDFAVYYC

SEQ ID NO: 564 - protein, 38 aa, Homo sapiens
YYADAVKGRFTISRDRSKNTLYLQMSSLRAEDTAVYYC

SEQ ID NO: 565 - protein, 36 aa, Homo sapiens
TRATGIPARFSGSGSGTDFTLTISSLEPEDFAVYYC

SEQ ID NO: 566 - protein, 38 aa, Homo sapiens
TYNPSLKTRVTIAIDKSKNQFSLELNSVTAADTAIYYC

SEQ ID NO: 567 - protein, 36 aa, Homo sapiens
SRATGIPDRFSGSGSGTDFTLTISRLEPEDFAVYHC

SEQ ID NO: 568 - protein, 38 aa, Homo sapiens
IYSPSFQGQVTISADKSNSTAYLQWRSLKASDTAMYYC

SEQ ID NO: 569 - protein, 36 aa, Homo sapiens
TRESGVPDRFSGSGSGTNFTLTISSLQAEDVALYYC

SEQ ID NO: 570 - protein, 38 aa, Homo sapiens
NYNPSLKSRVTISVDKSKNQFSLRLSSVTAADTAVYYC

SEQ ID NO: 571 - protein, 36 aa, Homo sapiens
NRATDIPARFSGSGSGTDFTLTISSLEPEDFAVYYC

SEQ ID NO: 572 - protein, 38 aa, Homo sapiens
TYAQAFTGRFVFSLDTSVSTAFLQITSLKAEDTAVYYC

SEQ ID NO: 573 - protein, 36 aa, Homo sapiens
TLESGVPSRFSGSGSGTEFTLTISSLQPDDFATYYC

SEQ ID NO: 574 - protein, 38 aa, Homo sapiens
TYAQAFTGRFVFSSDTSASTAYLQINSLKAEDTAVYYC

SEQ ID NO: 575 - protein, 36 aa, Homo sapiens; identical to SEQ ID NO: 573

SEQ ID NO: 576 - protein, 38 aa, Homo sapiens
NYAQKFQGRVSVTTDTSAGTAYLELRSLTSDDTAVYYC

SEQ ID NO: 577 - protein, 36 aa, Homo sapiens
KRDSGVPDRISGSGSHTDFTLRISRVEAEDVGVYYC

SEQ ID NO: 578 - protein, 38 aa, Homo sapiens
NYNPSLKSRVTLSVDTSKNQVSLNVSSVTAADTAVYYC

SEQ ID NO: 579 - protein, 36 aa, Homo sapiens
KRATGIPARFSGSGSGTDFTLTISSLEPEDFAVYYC

SEQ ID NO: 580 - protein, 36 aa, Homo sapiens
TRASGVPDRFSGSGSGTDFTLKISRVEAEDVGVYYC

SEQ ID NO: 581 - protein, 38 aa, Homo sapiens
NYNPSLKSRVTISIATSKTQFSLKLSSVTAADTAVYYC

SEQ ID NO: 582 - protein, 36 aa, Homo sapiens
TRESGVPDRFSGSGSGTDFTLTISSLQAEDVAIYYC

SEQ ID NO: 583 - protein, 38 aa, Homo sapiens
YYNPSLKSRVTISLDTSKNHFSLRLSSVTAADTAVYYC

SEQ ID NO: 584 - protein, 36 aa, Homo sapiens
TRATGIPARFSGSGSGTEFTLTISSLQSEDFAVYYC

SEQ ID NO: 585 - protein, 38 aa, Homo sapiens
YYAQKFQGRITITADESTSTAYMELSSLRSDDTAVYYC

SEQ ID NO: 586 - protein, 36 aa, Homo sapiens
NLETGVPSRFSGSGSGTDFTFTITSLQPEDIATYYC

SEQ ID NO: 587 - protein, 38 aa, Homo sapiens
KYGKKFQGRVTITSDTSTSTAYMELSSLRSDDTAIYYC

SEQ ID NO: 588 - protein, 36 aa, Homo sapiens
SLESGVPSRFSGGGSGTEFTLTISSLQADDSATYYC

SEQ ID NO: 589 - protein, 38 aa, Homo sapiens
DYNPSLKSRVAISIDTFENQFSLKLSSVTAADTAVYYC

SEQ ID NO: 590 - protein, 36 aa, Homo sapiens
TRATGIPARFSGSGSGTDFILTISSLQSEDFALYYC

SEQ ID NO: 591 - protein, 38 aa, Homo sapiens
GYADSVKGRFTISRDNAKNSLYLQMNSLRTEDTALYFC

SEQ ID NO: 592 - protein, 36 aa, Homo sapiens
TRATGIPARFRGSGSGTDFTLTISSVQSEDFAVYYC

SEQ ID NO: 593 - protein, 38 aa, Homo sapiens
YYNPSLKSRVTISVDTSKNQFSLKLSSVTAADTAVYYC

SEQ ID NO: 594 - protein, 36 aa, Homo sapiens
NRFSGVPDRFSGSGAGTDFTLKISRVEAEDVGVYYC

SEQ ID NO: 595 - protein, 38 aa, Homo sapiens
NYAQKVQDRVTMTTETSTSTAYMELRSLRSDDTAMYYC

SEQ ID NO: 596 - protein, 36 aa, Homo sapiens
SRATGIPDRFSGGGSGTDFTLTISRLEPEDFGVYYC

SEQ ID NO: 597 - protein, 38 aa, Homo sapiens
NYNPSLGSRVTISLDSSKTQFSLKLTSMTAADTAVYYC

SEQ ID NO: 598 - protein, 36 aa, Homo sapiens
TLQSGVPSRFSGSGSGTEFTLTISSLQAEDVATYYC

SEQ ID NO: 599 - protein, 38 aa, Homo sapiens
KYAQKFQGRVTITADKSTNTAYMDLISLKSEDTAMYYC

SEQ ID NO: 600 - protein, 36 aa, Homo sapiens
TLETGVPSRFSGSGSGTQFTLTITNLQPDDSATYYC

SEQ ID NO: 601 - protein, 38 aa, Homo sapiens
DYNPSLKSRVSISVDTSKSQFSLKLSSVDAADTAVYYC

SEQ ID NO: 602 - protein, 36 aa, Homo sapiens
SLQSGVPSRFSGSGSGTDFTLTISSLQPEDFATYYC

SEQ ID NO: 603 - protein, 38 aa, Homo sapiens
DYAQKFRGRVTITADEFTSTAYMELSSLRSEDTAVYYC

SEQ ID NO: 604 - protein, 36 aa, Homo sapiens
TRESGVPDRFSGSGSGTDFTLTITSLQPEDVAVYYC

SEQ ID NO: 605 - protein, 38 aa, Homo sapiens
KYNPSLESRVTMSVDTSKNQFSLKLTSVTAADTAVYYC

SEQ ID NO: 606 - protein, 36 aa, Homo sapiens
SLQSGIPSRFSGSGSGTDFTLIITSLQPEDVATYYC

SEQ ID NO: 607 - protein, 38 aa, Homo sapiens
NYAQIFQDRVTLTIDTYTSTAYMEFRSLVSDDTGIYYC

SEQ ID NO: 608 - protein, 36 aa, Homo sapiens
TLQSGVPSRFSGSGSGTVFTLTISRLQPEDVATYYC

SEQ ID NO: 609 - protein, 38 aa, Homo sapiens
NYAQKFQGRVTITADESTSTAYMELSSLRSEDTAVYYC

SEQ ID NO: 610 - protein, 36 aa, Homo sapiens
NRATGIPDRFSGSGSGTDFTLAISRLEPEDFAVYYC

SEQ ID NO: 611 - protein, 38 aa, Homo sapiens
TYAQKFQGRLTITSGFMELSSLTSEDTAMYFCARKDAG

SEQ ID NO: 612 - protein, 36 aa, Homo sapiens
RRASGVPDRFSGSGSGTDFALKISRVEAEDVGVYYC

SEQ ID NO: 613 - protein, 38 aa, Homo sapiens
NYAQKFQGSVTITADESTRTAYMELSSLTSEDTAMYYC

SEQ ID NO: 614 - protein, 36 aa, Homo sapiens
TRATGIPDRFSGSGSGTDFTLTISRLEPEDFAVYYC

SEQ ID NO: 615 - protein, 38 aa, Homo sapiens
KYAQKFQGRVTISADESTRIVQMELSSLRSDDTAIYYC

SEQ ID NO: 616 - protein, 36 aa, Homo sapiens
SRATGIPARFSGSGSGTEFTLSISSLQPEDFAVYYC

SEQ ID NO: 617 - protein, 38 aa, Homo sapiens
YYADSVKGRFTVSRDNSKSTLYLQMNSLRPEDTAIYYC

SEQ ID NO: 618 - protein, 36 aa, Homo sapiens
NRASGVPDRFSGSGSGTDFTLKISRVEAEDVGVYYC

SEQ ID NO: 619 - protein, 38 aa, Homo sapiens
YYADSVKGRFTISRDDAKNSLFLHMNSLRAEDTAVYYC

SEQ ID NO: 620 - protein, 36 aa, Homo sapiens
TRAAGIPDRFSGSGSGTDFTLTISRLEPEDFAVYYC

SEQ ID NO: 621 - protein, 38 aa, Homo sapiens
RYGPSFQGQVTISADKSVTTAYLRWSSVQASDSAIYYC

SEQ ID NO: 622 - protein, 36 aa, Homo sapiens
SRPTGIPDRFSGSGSGTHFTLTITRLEPEDFAVYYC

SEQ ID NO: 623 - protein, 38 aa, Homo sapiens
YYADSVKGRFTISRDNSNNTVYLQMNGLRVEDTAVYYC

SEQ ID NO: 624 - protein, 36 aa, Homo sapiens
TRDSGVPDRFSGSGSGADFTLTITSLQAEDVAVYYC

SEQ ID NO: 625 - protein, 38 aa, Homo sapiens
NYAQNFQGRLMITADESPSTAYMELSSLRSEDTAVYYC

SEQ ID NO: 626 - protein, 36 aa, Homo sapiens
NRASGIPARFSGSGSGTDFTLTISSLEPEDFAVYYC

SEQ ID NO: 627 - protein, 38 aa, Homo sapiens
GYADSVEGRFTISRDNAKNSLYLQMNNLRVEDTALYYC

SEQ ID NO: 628 - protein, 36 aa, Homo sapiens
TRATGVPARFSGSGSGTEFTLTISSLQSEDFAVYYC

SEQ ID NO: 629 - protein, 38 aa, Homo sapiens
YYADSVKGRFTISRDNSKNTLYLQMSSLRAEDTAVYYC

SEQ ID NO: 630 - protein, 36 aa, Homo sapiens; identical to SEQ ID NO: 602

SEQ ID NO: 631 - protein, 38 aa, Homo sapiens
YYADSVKGRFTISRDNSKNTLYLQMNSLRAEDTAVYYC

SEQ ID NO: 632 - protein, 38 aa, Homo sapiens
YYADSVKGRFTISRDNAKNSLYLQMNSLRAEDTAVYYC

SEQ ID NO: 633 - protein, 36 aa, Homo sapiens; identical to SEQ ID NO: 584

SEQ ID NO: 634 - protein, 38 aa, Homo sapiens; identical to SEQ ID NO: 631

SEQ ID NO: 635 - protein, 36 aa, Homo sapiens; identical to SEQ ID NO: 602

SEQ ID NO: 636 - protein, 38 aa, Homo sapiens
YANPSLRSRITMSLDTSKNQFSLKVSSVTAVDTAVYYC

SEQ ID NO: 637 - protein, 36 aa, Homo sapiens
TLQSGVPSRFSGSGSGTEFTLTINSLQPDDFATYYC

SEQ ID NO: 638 - protein, 36 aa, Homo sapiens
TRATGVPARFSGSGSGTEFTLSISSLQSEDFAVYYC

SEQ ID NO: 639 - protein, 38 aa, Homo sapiens
YYAESVEGRFTISRDNAKNSLYLEMNSLRAEDTAVYYC

SEQ ID NO: 640 - protein, 36 aa, Homo sapiens
DLETGVPSRFSGSGSGTDFTFTISRLQPEDTATYYC

SEQ ID NO: 641 - protein, 14 aa, Homo sapiens
ARDRYADSNYYFDS

SEQ ID NO: 642 - protein, 10 aa, Homo sapiens
QQYSQWPPLT

SEQ ID NO: 643 - protein, 18 aa, Homo sapiens
VRDNSGYYENYHYYGMDV

SEQ ID NO: 644 - protein, 9 aa, Homo sapiens
QQLNNYPYT

SEQ ID NO: 645 - protein, 15 aa, Homo sapiens
AKAGLQRFSPHFMDV

SEQ ID NO: 646 - protein, 10 aa, Homo sapiens
QQYHSHSKLT

SEQ ID NO: 647 - protein, 12 aa, Homo sapiens
VRDLVWVQLPDY

SEQ ID NO: 648 - protein, 9 aa, Homo sapiens
QQYGSSPTT

SEQ ID NO: 649 - protein, 10 aa, Homo sapiens
ARDFDRGAEH

SEQ ID NO: 650 - protein, 9 aa, Homo sapiens
LQGTHWPRT

SEQ ID NO: 651 - protein, 19 aa, Homo sapiens
ARYYLAGNCRTSNCYVFDY

SEQ ID NO: 652 - protein, 9 aa, Homo sapiens
QQLNSFPPT

SEQ ID NO: 653 - protein, 21 aa, Homo sapiens
AKHVTGYYLSGGEGGGGTLDV

SEQ ID NO: 654 - protein, 9 aa, Homo sapiens
QQRINWPLT

SEQ ID NO: 655 - protein, 7 aa, Homo sapiens
VKDQWDY

SEQ ID NO: 656 - protein, 9 aa, Homo sapiens
QQRNNWPLT

SEQ ID NO: 657 - protein, 13 aa, Homo sapiens
VAVAFRAYALFDD

SEQ ID NO: 658 - protein, 9 aa, Homo sapiens
QQYGSSPRT

SEQ ID NO: 659 - protein, 17 aa, Homo sapiens
ARHQVSAGYTGYYHFDY

SEQ ID NO: 660 - protein, 9 aa, Homo sapiens
QQYYSSPLT

SEQ ID NO: 661 - protein, 14 aa, Homo sapiens
ARERNRVYYYGMDV

SEQ ID NO: 662 - protein, 6 aa, Homo sapiens
QQRRNT

SEQ ID NO: 663 - protein, 14 aa, Homo sapiens
ATRGPVVLGEALAY

SEQ ID NO: 664 - protein, 8 aa, Homo sapiens
QQYNNYSG

SEQ ID NO: 665 - protein, 14 aa, Homo sapiens
ATRGPLVLGEALDS

SEQ ID NO: 666 - protein, 8 aa, Homo sapiens
QQYNSYSG

SEQ ID NO: 667 - protein, 16 aa, Homo sapiens
ARDEGQYRGNWDHFDY

SEQ ID NO: 668 - protein, 9 aa, Homo sapiens
MQATHWPRT

SEQ ID NO: 669 - protein, 18 aa, Homo sapiens
ARGRGGYATYYYYYYVDV

SEQ ID NO: 670 - protein, 8 aa, Homo sapiens
QQRSNWLT

SEQ ID NO: 671 - protein, 9 aa, Homo sapiens
MQALQTPLT

SEQ ID NO: 672 - protein, 14 aa, Homo sapiens
ARDQNDYGEDPLDV

SEQ ID NO: 673 - protein, 10 aa, Homo sapiens
QQYCGTPLYT

SEQ ID NO: 674 - protein, 22 aa, Homo sapiens
ARQVFYDNDDHDGLGYYYGLDV

SEQ ID NO: 675 - protein, 8 aa, Homo sapiens
QQYNNWPT

SEQ ID NO: 676 - protein, 19 aa, Homo sapiens
GRARRQVTLDNSFSYPMDV

SEQ ID NO: 677 - protein, 9 aa, Homo sapiens
QHYDNVPPT

SEQ ID NO: 678 - protein, 16 aa, Homo sapiens
ATSAGGIVNYFLLFDI

SEQ ID NO: 679 - protein, 9 aa, Homo sapiens
QHYNTYSGT

SEQ ID NO: 680 - protein, 19 aa, Homo sapiens
ARVNIYLVTVEEYHYGMDV

SEQ ID NO: 681 - protein, 11 aa, Homo sapiens
QHYNRWPLGFT

SEQ ID NO: 682 - protein, 12 aa, Homo sapiens
ARSNGAGSYSES

SEQ ID NO: 683 - protein, 8 aa, Homo sapiens
QQYNNWPH

SEQ ID NO: 684 - protein, 14 aa, Homo sapiens
ARGRGATVTTHFDY

SEQ ID NO: 685 - protein, 10 aa, Homo sapiens
MQATQFPSIT

SEQ ID NO: 686 - protein, 16 aa, Homo sapiens
ARMGIVVAPAVGSLDY

SEQ ID NO: 687 - protein, 9 aa, Homo sapiens
QQYGTSPWT

SEQ ID NO: 688 - protein, 14 aa, Homo sapiens
ARDRHDYGEDPFDI

SEQ ID NO: 689 - protein, 9 aa, Homo sapiens
QKYNSVPLT

SEQ ID NO: 690 - protein, 16 aa, Homo sapiens
ATSAGGIVNYYLSFNI

SEQ ID NO: 691 - protein, 9 aa, Homo sapiens
QQYSTYSGT

SEQ ID NO: 692 - protein, 23 aa, Homo sapiens
ARDSRLLEWFTVDSPYDYYAMDV

SEQ ID NO: 693 - protein, 9 aa, Homo sapiens
QQTYSPPRT

SEQ ID NO: 694 - protein, 13 aa, Homo sapiens
ARDRSDEDYDIGY

SEQ ID NO: 695 - protein, 9 aa, Homo sapiens
QQYYSTSWT

SEQ ID NO: 696 - protein, 15 aa, Homo sapiens
ARDRTGAGDKNAFDV

SEQ ID NO: 697 - protein, 9 aa, Homo sapiens
QQSYDTPQT

SEQ ID NO: 698 - protein, 21 aa, Homo sapiens
ARGASSTGTMGLRGKNDAFDI

SEQ ID NO: 699 - protein, 9 aa, Homo sapiens
QVYISAPYT

SEQ ID NO: 700 - protein, 14 aa, Homo sapiens
ARGPYYYGNSHLDF

SEQ ID NO: 701 - protein, 9 aa, Homo sapiens
QQYGTSPRT

SEQ ID NO: 702 - protein, 8 aa, Homo sapiens
SAYKSFDV

SEQ ID NO: 703 - protein, 9 aa, Homo sapiens
MQSLQTPPT

SEQ ID NO: 704 - protein, 12 aa, Homo sapiens
ARDGGWLRTLDS

SEQ ID NO: 705 - protein, 11 aa, Homo sapiens
QYYVSSPRRFT

SEQ ID NO: 706 - protein, 14 aa, Homo sapiens
ASSSGSYYGDYFDY

SEQ ID NO: 707 - protein, 9 aa, Homo sapiens
QQYNNWPRT

SEQ ID NO: 708 - protein, 15 aa, Homo sapiens
ARSTCGGSCYYRLDP

SEQ ID NO: 709 - protein, 9 aa, Homo sapiens
MQPLQTPFT

SEQ ID NO: 710 - protein, 13 aa, Homo sapiens
ARSPGIAVGLIDY

SEQ ID NO: 711 - protein, 9 aa, Homo sapiens
QQYGRSPRT

SEQ ID NO: 712 - protein, 23 aa, Homo sapiens
ARLGCGTTDCSPTWPYYYYGLDV

SEQ ID NO: 713 - protein, 8 aa, Homo sapiens
QQYGRSPT

SEQ ID NO: 714 - protein, 18 aa, Homo sapiens
AKGLAYCSFGSCPYPLDY

SEQ ID NO: 715 - protein, 9 aa, Homo sapiens
QQYVTSPRT

SEQ ID NO: 716 - protein, 23 aa, Homo sapiens
ARGRTSGSQDRLPLLWGLSGFDI

SEQ ID NO: 717 - protein, 8 aa, Homo sapiens
QQSSNWVT

SEQ ID NO: 718 - protein, 13 aa, Homo sapiens
TKAHSATHQGFDY

SEQ ID NO: 719 - protein, 10 aa, Homo sapiens
QQYNGWPLYT

SEQ ID NO: 720 - protein, 20 aa, Homo sapiens
VNGGRAFGVVIKYYYYGMDV

SEQ ID NO: 721 - protein, 9 aa, Homo sapiens
QQSYSTPIT

SEQ ID NO: 722 - protein, 13 aa, Homo sapiens
ARDSEGSGWYFDY

SEQ ID NO: 723 - protein, 18 aa, Homo sapiens
ARRPSGFLEGYYYYYMDV

SEQ ID NO: 724 - protein, 9 aa, Homo sapiens
QQYNNWPLT

SEQ ID NO: 725 - protein, 13 aa, Homo sapiens
ARDSEGSGWYFDY

SEQ ID NO: 726 - protein, 9 aa, Homo sapiens
QQSYSTPIT

SEQ ID NO: 727 - protein, 11 aa, Homo sapiens
ALGLTSGWIDY

SEQ ID NO: 728 - protein, 8 aa, Homo sapiens
QQYNSFRT

SEQ ID NO: 729 - protein, 10 aa, Homo sapiens
QHYNDWPSCS

SEQ ID NO: 730 - protein, 18 aa, Homo sapiens
ARAGLGTVDLRWGGAFDH

SEQ ID NO: 731 - protein, 9 aa, Homo sapiens
QQYDDLPYT

SEQ ID NO: 732 - protein, 16 aa, Homo sapiens
CARDRYADSNYYFDSW

SEQ ID NO: 733 - protein, 12 aa, Homo sapiens
CQQYSQWPPLTF

SEQ ID NO: 734 - protein, 20 aa, Homo sapiens
CVRDNSGYYENYHYYGMDVW

SEQ ID NO: 735 - protein, 11 aa, Homo sapiens [sequence omitted]

SEQ ID NO: 736 - protein, 17 aa, Homo sapiens
CAKAGLQRFSPHFMDVW

SEQ ID NO: 737 - protein, 12 aa, Homo sapiens
CQQYHSHSKLTF

SEQ ID NO: 738 - protein, 14 aa, Homo sapiens
CVRDLVWVQLPDYW

SEQ ID NO: 739 - protein, 11 aa, Homo sapiens [sequence omitted]

SEQ ID NO: 740 - protein, 12 aa, Homo sapiens
CARDFDRGAEHW

SEQ ID NO: 741 - protein, 11 aa, Homo sapiens [sequence omitted]

SEQ ID NO: 742 - protein, 21 aa, Homo sapiens
CARYYLAGNCRTSNCYVFDYW

SEQ ID NO: 743 - protein, 11 aa, Homo sapiens [sequence omitted]

SEQ ID NO: 744 - protein, 23 aa, Homo sapiens
CAKHVTGYYLSGGEGGGGTLDVW

SEQ ID NO: 745 - protein, 11 aa, Homo sapiens [sequence omitted]

SEQ ID NO: 746 - protein, 9 aa, Homo sapiens
CVKDQWDYW

SEQ ID NO: 747 - protein, 11 aa, Homo sapiens [sequence omitted]

SEQ ID NO: 748 - protein, 15 aa, Homo sapiens
CVAVAFRAYALFDDW

SEQ ID NO: 749 - protein, 11 aa, Homo sapiens [sequence omitted]

SEQ ID NO: 750 - protein, 19 aa, Homo sapiens
CARHQVSAGYTGYYHFDYW

SEQ ID NO: 751 - protein, 11 aa, Homo sapiens [sequence omitted]

SEQ ID NO: 752 - protein, 16 aa, Homo sapiens
CARERNRVYYYGMDVW

SEQ ID NO: 753 - protein, 8 aa, Homo sapiens
CQQRRNTF

SEQ ID NO: 754 - protein, 16 aa, Homo sapiens
CATRGPVVLGEALAYW

SEQ ID NO: 755 - protein, 10 aa, Homo sapiens
CQQYNNYSGF

SEQ ID NO: 756 - protein, 16 aa, Homo sapiens
CATRGPLVLGEALDSW

SEQ ID NO: 757 - protein, 10 aa, Homo sapiens [sequence omitted]

SEQ ID NO: 758 - protein, 18 aa, Homo sapiens
CARDEGQYRGNWDHFDYW

SEQ ID NO: 759 - protein, 11 aa, Homo sapiens [sequence omitted]

SEQ ID NO: 760 - protein, 20 aa, Homo sapiens
CARGRGGYATYYYYYYVDVW

SEQ ID NO: 761 - protein, 10 aa, Homo sapiens [sequence omitted]

SEQ ID NO: 762 - protein, 11 aa, Homo sapiens [sequence omitted]

SEQ ID NO: 763 - protein, 16 aa, Homo sapiens
CARDQNDYGEDPLDVW

SEQ ID NO: 764 - protein, 12 aa, Homo sapiens
CQQYCGTPLYTF

SEQ ID NO: 765 - protein, 24 aa, Homo sapiens
CARQVFYDNDDHDGLGYYYGLDVW

SEQ ID NO: 766 - protein, 10 aa, Homo sapiens [sequence omitted]

SEQ ID NO: 767 - protein, 21 aa, Homo sapiens
CGRARRQVTLDNSFSYPMDVW

SEQ ID NO: 768 - protein, 11 aa, Homo sapiens
CQHYDNVPPTF

SEQ ID NO: 769 - protein, 18 aa, Homo sapiens
CATSAGGIVNYFLLFDIW

SEQ ID NO: 770 - protein, 11 aa, Homo sapiens [sequence omitted]

SEQ ID NO: 771 - protein, 21 aa, Homo sapiens
CARVNIYLVTVEEYHYGMDVW

SEQ ID NO: 772 - protein, 13 aa, Homo sapiens
CQHYNRWPLGFTF

SEQ ID NO: 773 - protein, 14 aa, Homo sapiens
CARSNGAGSYSESW

SEQ ID NO: 774 - protein, 10 aa, Homo sapiens [sequence omitted]

SEQ ID NO: 775 - protein, 16 aa, Homo sapiens
CARGRGATVTTHFDYW

SEQ ID NO: 776 - protein, 12 aa, Homo sapiens [sequence omitted]

SEQ ID NO: 777 - protein, 18 aa, Homo sapiens
CARMGIVVAPAVGSLDYW

SEQ ID NO: 778 - protein, 11 aa, Homo sapiens [sequence omitted]

SEQ ID NO: 779 - protein, 16 aa, Homo sapiens
CARDRHDYGEDPFDIW

SEQ ID NO: 780 - protein, 11 aa, Homo sapiens [sequence omitted]

SEQ ID NO: 781 - protein, 18 aa, Homo sapiens
CATSAGGIVNYYLSFNIW

SEQ ID NO: 782 - protein, 11 aa, Homo sapiens [sequence omitted]

SEQ ID NO: 783 - protein, 25 aa, Homo sapiens
CARDSRLLEWFTVDSPYDYYAMDVW

SEQ ID NO: 784 - protein, 11 aa, Homo sapiens [sequence omitted]

SEQ ID NO: 785 - protein, 15 aa, Homo sapiens
CARDRSDEDYDIGYW

SEQ ID NO: 786 - protein, 11 aa, Homo sapiens [sequence omitted]

SEQ ID NO: 787 - protein, 17 aa, Homo sapiens
CARDRTGAGDKNAFDVW

SEQ ID NO: 788 - protein, 11 aa, Homo sapiens
CQQSYDTPQTF

SEQ ID NO: 789 - protein, 23 aa, Homo sapiens
CARGASSTGTMGLRGKNDAFDIW

SEQ ID NO: 790 - protein, 11 aa, Homo sapiens
CQVYISAPYTF

SEQ ID NO: 791 - protein, 16 aa, Homo sapiens
CARGPYYYGNSHLDFW

SEQ ID NO: 792 - protein, 11 aa, Homo sapiens [sequence omitted]

SEQ ID NO: 793 - protein, 10 aa, Homo sapiens
GSAYKSFDVW

SEQ ID NO: 794 - protein, 11 aa, Homo sapiens [sequence omitted]

SEQ ID NO: 795 - protein, 14 aa, Homo sapiens
CARDGGWLRTLDSW

SEQ ID NO: 796 - protein, 13 aa, Homo sapiens
CQYYVSSPRRFTF

SEQ ID NO: 797 - protein, 16 aa, Homo sapiens
CASSSGSYYGDYFDYW

SEQ ID NO: 798 - protein, 11 aa, Homo sapiens [sequence omitted]

SEQ ID NO: 799 - protein, 17 aa, Homo sapiens
CARSTCGGSCYYRLDPW

SEQ ID NO: 800 - protein, 11 aa, Homo sapiens [sequence omitted]

SEQ ID NO: 801 - protein, 15 aa, Homo sapiens
CARSPGIAVGLIDYW

SEQ ID NO: 802 - protein, 11 aa, Homo sapiens [sequence omitted]

SEQ ID NO: 803 - protein, 25 aa, Homo sapiens
CARLGCGTTDCSPTWPYYYYGLDVW

SEQ ID NO: 804 - protein, 10 aa, Homo sapiens [sequence omitted]

SEQ ID NO: 805 - protein, 20 aa, Homo sapiens
CAKGLAYCSFGSCPYPLDYW

SEQ ID NO: 806 - protein, 11 aa, Homo sapiens
CQQYVTSPRTF

SEQ ID NO: 807 - protein, 25 aa, Homo sapiens
CARGRTSGSQDRLPLLWGLSGFDIW

SEQ ID NO: 808 - protein, 10 aa, Homo sapiens
CQQSSNWVTF

SEQ ID NO: 809 - protein, 15 aa, Homo sapiens
CTKAHSATHQGFDYW

SEQ ID NO: 810 - protein, 12 aa, Homo sapiens
CQQYNGWPLYTF

SEQ ID NO: 811 - protein, 22 aa, Homo sapiens
CVNGGRAFGVVIKYYYYGMDVW

SEQ ID NO: 812 - protein, 11 aa, Homo sapiens [sequence omitted]

SEQ ID NO: 813 - protein, 15 aa, Homo sapiens
CARDSEGSGWYFDYW

SEQ ID NO: 814 - protein, 20 aa, Homo sapiens
CARRPSGFLEGYYYYYMDVW

SEQ ID NO: 815 - protein, 11 aa, Homo sapiens [sequence omitted]

SEQ ID NO: 816 - protein, 15 aa, Homo sapiens
CARDSEGSGWYFDYW

SEQ ID NO: 817 - protein, 11 aa, Homo sapiens [sequence omitted]

SEQ ID NO: 818 - protein, 13 aa, Homo sapiens
CALGLTSGWIDYW

SEQ ID NO: 819 - protein, 10 aa, Homo sapiens [sequence omitted]

SEQ ID NO: 820 - protein, 12 aa, Homo sapiens
CQHYNDWPSCSF

SEQ ID NO: 821 - protein, 20 aa, Homo sapiens
CARAGLGTVDLRWGGAFDHW

SEQ ID NO: 822 - protein, 11 aa, Homo sapiens [sequence omitted]

SEQ ID NO: 823 - protein, 15 aa, Homo sapiens
YFDSWGPGTLVTVSS

SEQ ID NO: 824 - protein, 12 aa, Homo sapiens
LTFGGGTKVEIK

SEQ ID NO: 825 - protein, 19 aa, Homo sapiens
YHYYGMDVWGKGTTVTVSS

SEQ ID NO: 826 - protein, 12 aa, Homo sapiens
YTFGQGTKVEIK

SEQ ID NO: 827 - protein, 15 aa, Homo sapiens
FMDVWGTGTTVTVSS

SEQ ID NO: 828 - protein, 12 aa, Homo sapiens
LTFGGGTKVEIK

SEQ ID NO: 829 - protein, 13 aa, Homo sapiens
DYWGQGTLVTVSS

SEQ ID NO: 830 - protein, 11 aa, Homo sapiens
TFGQGTKVEIK

SEQ ID NO: 831 - protein, 13 aa, Homo sapiens
EHWGQGTLVTVSS

SEQ ID NO: 832 - protein, 11 aa, Homo sapiens
TFGQGTKVEIK

SEQ ID NO: 833 - protein, 14 aa, Homo sapiens
FDYWGRGTLVTVSS

SEQ ID NO: 834 - protein, 11 aa, Homo sapiens
TFGQGTKVEIK

SEQ ID NO: 835 - protein, 14 aa, Homo sapiens
LDVWGKGTTVTVSS

SEQ ID NO: 836 - protein, 12 aa, Homo sapiens
LTFGGGTKVEIK

SEQ ID NO: 837 - protein, 13 aa, Homo sapiens
DYWGQGTLVTVSS

SEQ ID NO: 838 - protein, 11 aa, Homo sapiens
TFGGGTKVEIK

SEQ ID NO: 839 - protein, 14 aa, Homo sapiens
FDDWGQGALVTVSS

SEQ ID NO: 840 - protein, 11 aa, Homo sapiens
TFGQGTKVEIK

SEQ ID NO: 841 - protein, 15 aa, Homo sapiens
HFDYWGQGTLVTVSS

SEQ ID NO: 842 - protein, 11 aa, Homo sapiens
TFGPGTKVDIK

SEQ ID NO: 843 - protein, 18 aa, Homo sapiens
YYYGMDVWGKGTTVTVSS

SEQ ID NO: 844 - protein, 11 aa, Homo sapiens
TFGGGTKVEIK

SEQ ID NO: 845 - protein, 13 aa, Homo sapiens
AYWGQGALVTVSS

SEQ ID NO: 846 - protein, 10 aa, Homo sapiens
FGQGTKVEIK

SEQ ID NO: 847 - protein, 13 aa, Homo sapiens
DSWGQGTLVTVSS

SEQ ID NO: 848 - protein, 10 aa, Homo sapiens
FGQGTKVEIK

SEQ ID NO: 849 - protein, 15 aa, Homo sapiens
HFDYWGQGTLVTVSS

SEQ ID NO: 850 - protein, 11 aa, Homo sapiens
TFGQGTKVEIK

SEQ ID NO: 851 - protein, 20 aa, Homo sapiens
YYYYYYVDVWGKGTTVTVSS

SEQ ID NO: 852 - protein, 11 aa, Homo sapiens
TFGGGTKVEIK

SEQ ID NO: 853 - protein, 11 aa, Homo sapiens
TFGQGTKVEIK

SEQ ID NO: 854 - protein, 16 aa, Homo sapiens
DPLDVWGQGTMVTVSS

SEQ ID NO: 855 - protein, 12 aa, Homo sapiens
YTFGQGTKVEIK

SEQ ID NO: 856 - protein, 18 aa, Homo sapiens
YYYGLDVWGKGTTVTVSS

SEQ ID NO: 857 - protein, 11 aa, Homo sapiens
TFGQGTKVEIK

SEQ ID NO: 858 - protein, 16 aa, Homo sapiens
YPMDVWGQGTTVTVSS

SEQ ID NO: 859 - protein, 11 aa, Homo sapiens
TFGGGTKVEIK

SEQ ID NO: 860 - protein, 14 aa, Homo sapiens
FDIWGQGTMVTVSS

SEQ ID NO: 861 - protein, 11 aa, Homo sapiens
TFGQGTKVEIK

SEQ ID NO: 862 - protein, 16 aa, Homo sapiens
YGMDVWGLGTTVTVSS

SEQ ID NO: 863 - protein, 12 aa, Homo sapiens
FTFGPGTKVDIK

SEQ ID NO: 864 - protein, 13 aa, Homo sapiens
ESWGQGTLVTVSS

SEQ ID NO: 865 - protein, 10 aa, Homo sapiens
FGGGTKVEIK

SEQ ID NO: 866 - protein, 14 aa, Homo sapiens
FDYWGQGTLVTVSS

SEQ ID NO: 867 - protein, 12 aa, Homo sapiens
ITFGQGTRLEIK

SEQ ID NO: 868 - protein, 13 aa, Homo sapiens
DYWGQGTLVTVSS

SEQ ID NO: 869 - protein, 12 aa, Homo sapiens
WTFGQGTKVEIK

SEQ ID NO: 870 - protein, 16 aa, Homo sapiens
DPFDIWGQGTMVTVSS

SEQ ID NO: 871 - protein, 12 aa, Homo sapiens
LTFGGGTKVEIK

SEQ ID NO: 872 - protein, 14 aa, Homo sapiens
FNIWGQGTMVTVSS

SEQ ID NO: 873 - protein, 11 aa, Homo sapiens
TFGQGTKVEIK

SEQ ID NO: 874 - protein, 17 aa, Homo sapiens
YYAMDVWGQGTTVTVSS

SEQ ID NO: 875 - protein, 11 aa, Homo sapiens
TFGQGTKVEIK

SEQ ID NO: 876 - protein, 13 aa, Homo sapiens
GYWGQGTLVTVSS

SEQ ID NO: 877 - protein, 12 aa, Homo sapiens
WTFGQGTKVEIK

SEQ ID NO: 878 - protein, 15 aa, Homo sapiens
AFDVWGPGTMVTVSS

SEQ ID NO: 879 - protein, 11 aa, Homo sapiens
TFGRGTKVEIK

SEQ ID NO: 880 - protein, 16 aa, Homo sapiens
DAFDIWGQGTMVTVSS

SEQ ID NO: 881 - protein, 12 aa, Homo sapiens
YTFGQGTKVEIK

SEQ ID NO: 882 - protein, 14 aa, Homo sapiens
LDFWGQGTMVTVSS

SEQ ID NO: 883 - protein, 11 aa, Homo sapiens
TFGQGTKVEIK

SEQ ID NO: 884 - protein, 10 aa, Homo sapiens
KSFDVWGQGT

SEQ ID NO: 885 - protein, 11 aa, Homo sapiens
TFGQGTKVEIK

SEQ ID NO: 886 - protein, 13 aa, Homo sapiens
DSWGQGTLVTVSS

SEQ ID NO: 887 - protein, 12 aa, Homo sapiens
FTFGPGTKVDIK

SEQ ID NO: 888 - protein, 15 aa, Homo sapiens
YFDYWGQGTLVTVSS

SEQ ID NO: 889 - protein, 11 aa, Homo sapiens
TFGQGTKVEIK

SEQ ID NO: 890 - protein, 15 aa, Homo sapiens
RLDPWGQGTLVTVSS

SEQ ID NO: 891 - protein, 12 aa, Homo sapiens
FTFGPGTKVDIK

SEQ ID NO: 892 - protein, 13 aa, Homo sapiens
DYWGQGSLVTVSS

SEQ ID NO: 893 - protein, 11 aa, Homo sapiens
TFGQGTKVEIK

SEQ ID NO: 894 - protein, 19 aa, Homo sapiens
YYYYGLDVWGQGTTVTVSS

SEQ ID NO: 895 - protein, 11 aa, Homo sapiens
TFGQGTRLEIK

SEQ ID NO: 896 - protein, 13 aa, Homo sapiens
DYWGQGTLVTVSS

SEQ ID NO: 897 - protein, 11 aa, Homo sapiens
TFGQGTKVEIK

SEQ ID NO: 898 - protein, 15 aa, Homo sapiens
GFDIWGQGTMVTVSS

SEQ ID NO: 899 - protein, 11 aa, Homo sapiens
TFGAGTKVEIK

SEQ ID NO: 900 - protein, 14 aa, Homo sapiens
FDYWGQGSLVTVSS

SEQ ID NO: 901 - protein, 12 aa, Homo sapiens
YTFGQGTKVEIK

SEQ ID NO: 902 - protein, 19 aa, Homo sapiens
YYYYGMDVWGQGTTVTVSS

SEQ ID NO: 903 - protein, 12 aa, Homo sapiens
ITFGQGTRLEIK

SEQ ID NO: 904 - protein, 15 aa, Homo sapiens
YFDYWGQGTLVTVSS

SEQ ID NO: 905 - protein, 19 aa, Homo sapiens
YYYYYMDVWGKGTTVTVSS

SEQ ID NO: 906 - protein, 12 aa, Homo sapiens
LTFGGGTKVEIK

SEQ ID NO: 907 - protein, 15 aa, Homo sapiens
YFDYWGQGTLVTVSS

SEQ ID NO: 908 - protein, 12 aa, Homo sapiens
ITFGQGTRLEIK

SEQ ID NO: 909 - protein, 13 aa, Homo sapiens
DYWGQGILVTVSS

SEQ ID NO: 910 - protein, 11 aa, Homo sapiens
TFGQGTKVEIK

SEQ ID NO: 911 - protein, 12 aa, Homo sapiens
CSFGQGTKLEIT

SEQ ID NO: 912 - protein, 14 aa, Homo sapiens
FDHWGKGILVTVSS

SEQ ID NO: 913 - protein, 12 aa, Homo sapiens
YTFGQGTKVEIK

SEQ ID NO: 914 - protein, 11 aa, Homo sapiens
WGPGTLVTVSS

SEQ ID NO: 915 - protein, 10 aa, Homo sapiens
FGGGTKVEIK

SEQ ID NO: 916 - protein, 11 aa, Homo sapiens
WGKGTTVTVSS

SEQ ID NO: 917 - protein, 10 aa, Homo sapiens
FGQGTKVEIK

SEQ ID NO: 918 - protein, 11 aa, Homo sapiens
WGTGTTVTVSS

SEQ ID NO: 919 - protein, 10 aa, Homo sapiens
FGGGTKVEIK

SEQ ID NO: 920 - protein, 11 aa, Homo sapiens
WGQGTLVTVSS

SEQ ID NO: 921 - protein, 10 aa, Homo sapiens
FGQGTKVEIK

SEQ ID NO: 922 - protein, 11 aa, Homo sapiens
WGQGTLVTVSS

SEQ ID NO: 923 - protein, 10 aa, Homo sapiens
FGQGTKVEIK

SEQ ID NO: 924 - protein, 11 aa, Homo sapiens
WGRGTLVTVSS

SEQ ID NO: 925 - protein, 10 aa, Homo sapiens
FGQGTKVEIK

SEQ ID NO: 926 - protein, 11 aa, Homo sapiens
WGKGTTVTVSS

SEQ ID NO: 927 - protein, 10 aa, Homo sapiens
FGGGTKVEIK

SEQ ID NO: 928 - protein, 11 aa, Homo sapiens
WGQGTLVTVSS

SEQ ID NO: 929 - protein, 10 aa, Homo sapiens
FGGGTKVEIK

SEQ ID NO: 930 - protein, 11 aa, Homo sapiens
WGQGALVTVSS

SEQ ID NO: 931 - protein, 10 aa, Homo sapiens
FGQGTKVEIK

SEQ ID NO: 932 - protein, 11 aa, Homo sapiens
WGQGTLVTVSS

SEQ ID NO: 933 - protein, 10 aa, Homo sapiens
FGPGTKVDIK

SEQ ID NO: 934 - protein, 11 aa, Homo sapiens
WGKGTTVTVSS

SEQ ID NO: 935 - protein, 10 aa, Homo sapiens
FGGGTKVEIK

SEQ ID NO: 936 - protein, 11 aa, Homo sapiens
WGQGALVTVSS

SEQ ID NO: 937 - protein, 10 aa, Homo sapiens
FGQGTKVEIK

SEQ ID NO: 938 - protein, 11 aa, Homo sapiens
WGQGTLVTVSS

SEQ ID NO: 939 - protein, 10 aa, Homo sapiens
FGQGTKVEIK

SEQ ID NO: 940 - protein, 11 aa, Homo sapiens
WGQGTLVTVSS

SEQ ID NO: 941 - protein, 10 aa, Homo sapiens
FGQGTKVEIK

SEQ ID NO: 942 - protein, 11 aa, Homo sapiens
WGKGTTVTVSS

SEQ ID NO: 943 - protein, 10 aa, Homo sapiens
FGGGTKVEIK

SEQ ID NO: 944 - protein, 10 aa, Homo sapiens
FGQGTKVEIK

SEQ ID NO: 945 - protein, 11 aa, Homo sapiens
WGQGTMVTVSS

SEQ ID NO: 946 - protein, 10 aa, Homo sapiens
FGQGTKVEIK

SEQ ID NO: 947 - protein, 11 aa, Homo sapiens
WGKGTTVTVSS

SEQ ID NO: 948 - protein, 10 aa, Homo sapiens
FGQGTKVEIK

SEQ ID NO: 949 - protein, 11 aa, Homo sapiens
WGQGTTVTVSS

SEQ ID NO: 950 - protein, 10 aa, Homo sapiens
FGGGTKVEIK

SEQ ID NO: 951 - protein, 11 aa, Homo sapiens
WGQGTMVTVSS

SEQ ID NO: 952 - protein, 10 aa, Homo sapiens
FGQGTKVEIK

SEQ ID NO: 953 - protein, 11 aa, Homo sapiens
WGLGTTVTVSS

SEQ ID NO: 954 - protein, 10 aa, Homo sapiens
FGPGTKVDIK

SEQ ID NO: 955 - protein, 11 aa, Homo sapiens
WGQGTLVTVSS

SEQ ID NO: 956 - protein, 10 aa, Homo sapiens
FGGGTKVEIK

SEQ ID NO: 957 - protein, 11 aa, Homo sapiens
WGQGTLVTVSS

SEQ ID NO: 958 - protein, 10 aa, Homo sapiens
FGQGTRLEIK

SEQ ID NO: 959 - protein, 11 aa, Homo sapiens
WGQGTLVTVSS

SEQ ID NO: 960 - protein, 10 aa, Homo sapiens
FGQGTKVEIK

SEQ ID NO: 961 - protein, 11 aa, Homo sapiens
WGQGTMVTVSS

SEQ ID NO: 962 - protein, 10 aa, Homo sapiens
FGGGTKVEIK

SEQ ID NO: 963 - protein, 11 aa, Homo sapiens
WGQGTMVTVSS

SEQ ID NO: 964 - protein, 10 aa, Homo sapiens
FGQGTKVEIK

SEQ ID NO: 965 - protein, 11 aa, Homo sapiens
WGQGTTVTVSS

SEQ ID NO: 966 - protein, 10 aa, Homo sapiens
FGQGTKVEIK

SEQ ID NO: 967 - protein, 11 aa, Homo sapiens
WGQGTLVTVSS

SEQ ID NO: 968 - protein, 10 aa, Homo sapiens
FGQGTKVEIK

SEQ ID NO: 969 - protein, 11 aa, Homo sapiens
WGPGTMVTVSS

SEQ ID NO: 970 - protein, 10 aa, Homo sapiens
FGRGTKVEIK

SEQ ID NO: 971 - protein, 11 aa, Homo sapiens
WGQGTMVTVSS

SEQ ID NO: 972 - protein, 10 aa, Homo sapiens
FGQGTKVEIK

SEQ ID NO: 973 - protein, 11 aa, Homo sapiens
WGQGTMVTVSS

SEQ ID NO: 974 - protein, 10 aa, Homo sapiens
FGQGTKVEIK

SEQ ID NO: 975 - protein, 5 aa, Homo sapiens
WGQGT

SEQ ID NO: 976 - protein, 10 aa, Homo sapiens
FGQGTKVEIK

SEQ ID NO: 977 - protein, 11 aa, Homo sapiens
WGQGTLVTVSS

SEQ ID NO: 978 - protein, 10 aa, Homo sapiens
FGPGTKVDIK

SEQ ID NO: 979 - protein, 11 aa, Homo sapiens
WGQGTLVTVSS

SEQ ID NO: 980 - protein, 10 aa, Homo sapiens
FGQGTKVEIK

SEQ ID NO: 981 - protein, 11 aa, Homo sapiens
WGQGTLVTVSS

SEQ ID NO: 982 - protein, 10 aa, Homo sapiens
FGPGTKVDIK

SEQ ID NO: 983 - protein, 11 aa, Homo sapiens
WGQGSLVTVSS

SEQ ID NO: 984 - protein, 10 aa, Homo sapiens
FGQGTKVEIK

SEQ ID NO: 985 - protein, 11 aa, Homo sapiens
WGQGTTVTVSS

SEQ ID NO: 986 - protein, 10 aa, Homo sapiens
FGQGTRLEIK

SEQ ID NO: 987 - protein, 11 aa, Homo sapiens
WGQGTLVTVSS

SEQ ID NO: 988 - protein, 10 aa, Homo sapiens
FGQGTKVEIK

SEQ ID NO: 989 - protein, 11 aa, Homo sapiens
WGQGTMVTVSS

SEQ ID NO: 990 - protein, 10 aa, Homo sapiens
FGAGTKVEIK

SEQ ID NO: 991 - protein, 11 aa, Homo sapiens
WGQGSLVTVSS

SEQ ID NO: 992 - protein, 10 aa, Homo sapiens
FGQGTKVEIK

SEQ ID NO: 993 - protein, 11 aa, Homo sapiens
WGQGTTVTVSS

SEQ ID NO: 994 - protein, 10 aa, Homo sapiens
FGQGTRLEIK

SEQ ID NO: 995 - protein, 11 aa, Homo sapiens
WGQGTLVTVSS

SEQ ID NO: 996 - protein, 11 aa, Homo sapiens
WGKGTTVTVSS

SEQ ID NO: 997 - protein, 10 aa, Homo sapiens
FGGGTKVEIK

SEQ ID NO: 998 - protein, 11 aa, Homo sapiens
WGQGTLVTVSS

SEQ ID NO: 999 - protein, 10 aa, Homo sapiens
FGQGTRLEIK

SEQ ID NO: 1000 - protein, 11 aa, Homo sapiens
WGQGILVTVSS

SEQ ID NO: 1001 - protein, 10 aa, Homo sapiens
FGQGTKVEIK

SEQ ID NO: 1002 - protein, 10 aa, Homo sapiens
FGQGTKLEIT

SEQ ID NO: 1003 - protein, 11 aa, Homo sapiens
WGKGILVTVSS

SEQ ID NO: 1004 - protein, 10 aa, Homo sapiens
FGQGTKVEIK

SEQ ID NO: 1005 - protein, 16 aa, Homo sapiens
CARDRYADSNYYFDSW

SEQ ID NO: 1006 - protein, 12 aa, Homo sapiens
CQQYSQWPPLTF

SEQ ID NO: 1007 - protein, 20 aa, Homo sapiens
CVRDNSGYYENYHYYGMDVW

SEQ ID NO: 1008 - protein, 11 aa, Homo sapiens [sequence omitted]

SEQ ID NO: 1009 - protein, 17 aa, Homo sapiens
CAKAGLQRFSPHFMDVW

SEQ ID NO: 1010 - protein, 12 aa, Homo sapiens
CQQYHSHSKLTF

SEQ ID NO: 1011 - protein, 14 aa, Homo sapiens
CVRDLVWVQLPDYW

SEQ ID NO: 1012 - protein, 11 aa, Homo sapiens [sequence omitted]

SEQ ID NO: 1013 - protein, 12 aa, Homo sapiens
CARDFDRGAEHW

SEQ ID NO: 1014 - protein, 11 aa, Homo sapiens [sequence omitted]

SEQ ID NO: 1015 - protein, 21 aa, Homo sapiens
CARYYLAGNCRTSNCYVFDYW

SEQ ID NO: 1016 - protein, 11 aa, Homo sapiens [sequence omitted]

SEQ ID NO: 1017 - protein, 23 aa, Homo sapiens
CAKHVTGYYLSGGEGGGGTLDVW

SEQ ID NO: 1018 - protein, 11 aa, Homo sapiens [sequence omitted]

SEQ ID NO: 1019 - protein, 9 aa, Homo sapiens
CVKDQWDYW

SEQ ID NO: 1020 - protein, 11 aa, Homo sapiens [sequence omitted]

SEQ ID NO: 1021 - protein, 15 aa, Homo sapiens
CVAVAFRAYALFDDW

SEQ ID NO: 1022 - protein, 11 aa, Homo sapiens [sequence omitted]

SEQ ID NO: 1023 - protein, 19 aa, Homo sapiens
CARHQVSAGYTGYYHFDYW

SEQ ID NO: 1024 - protein, 11 aa, Homo sapiens [sequence omitted]

SEQ ID NO: 1025 - protein, 16 aa, Homo sapiens
CARERNRVYYYGMDVW

SEQ ID NO: 1026 - protein, 8 aa, Homo sapiens
CQQRRNTF

SEQ ID NO: 1027 - protein, 16 aa, Homo sapiens
CATRGPVVLGEALAYW

SEQ ID NO: 1028 - protein, 10 aa, Homo sapiens
CQQYNNYSGF

SEQ ID NO: 1029 - protein, 16 aa, Homo sapiens
CATRGPLVLGEALDSW

SEQ ID NO: 1030 - protein, 10 aa, Homo sapiens [sequence omitted]

SEQ ID NO: 1031 - protein, 18 aa, Homo sapiens
CARDEGQYRGNWDHFDYW

SEQ ID NO: 1032 - protein, 11 aa, Homo sapiens [sequence omitted]

SEQ ID NO: 1033 - protein, 20 aa, Homo sapiens
CARGRGGYATYYYYYYVDVW

SEQ ID NO: 1034 - protein, 10 aa, Homo sapiens [sequence omitted]

SEQ ID NO: 1035 - protein, 14 aa, Homo sapiens
CAREPYNDGYFESW

SEQ ID NO: 1036 - protein, 11 aa, Homo sapiens [sequence omitted]

SEQ ID NO: 1037 - protein, 16 aa, Homo sapiens
CARDQNDYGEDPLDVW

SEQ ID NO: 1038 - protein, 12 aa, Homo sapiens
CQQYCGTPLYTF

SEQ ID NO: 1039 - protein, 24 aa, Homo sapiens
CARQVFYDNDDHDGLGYYYGLDVW

SEQ ID NO: 1040 - protein, 10 aa, Homo sapiens [sequence omitted]

SEQ ID NO: 1041 - protein, 21 aa, Homo sapiens
CGRARRQVTLDNSFSYPMDVW

SEQ ID NO: 1042 - protein, 11 aa, Homo sapiens
CQHYDNVPPTF

SEQ ID NO: 1043 - protein, 18 aa, Homo sapiens
CATSAGGIVNYFLLFDIW

SEQ ID NO: 1044 - protein, 11 aa, Homo sapiens [sequence omitted]

SEQ ID NO: 1045 - protein, 21 aa, Homo sapiens
CARVNIYLVTVEEYHYGMDVW

SEQ ID NO: 1046 - protein, 13 aa, Homo sapiens
CQHYNRWPLGFTF

SEQ ID NO: 1047 - protein, 14 aa, Homo sapiens
CARSNGAGSYSESW

SEQ ID NO: 1048 - protein, 10 aa, Homo sapiens [sequence omitted]

SEQ ID NO: 1049 - protein, 16 aa, Homo sapiens
CARGRGATVTTHFDYW

SEQ ID NO: 1050 - protein, 12 aa, Homo sapiens [sequence omitted]

SEQ ID NO: 1051 - protein, 18 aa, Homo sapiens
CARMGIVVAPAVGSLDYW

SEQ ID NO: 1052 - protein, 11 aa, Homo sapiens [sequence omitted]

SEQ ID NO: 1053 - protein, 16 aa, Homo sapiens
CARDRHDYGEDPFDIW

SEQ ID NO: 1054 - protein, 11 aa, Homo sapiens [sequence omitted]

SEQ ID NO: 1055 - protein, 18 aa, Homo sapiens
CATSAGGIVNYYLSFNIW

SEQ ID NO: 1056 - protein, 11 aa, Homo sapiens [sequence omitted]

SEQ ID NO: 1057 - protein, 25 aa, Homo sapiens
CARDSRLLEWFTVDSPYDYYAMDVW

SEQ ID NO: 1058 - protein, 11 aa, Homo sapiens [sequence omitted]

SEQ ID NO: 1059 - protein, 15 aa, Homo sapiens
CARDRSDEDYDIGYW

SEQ ID NO: 1060 - protein, 11 aa, Homo sapiens [sequence omitted]

SEQ ID NO: 1061 - protein, 17 aa, Homo sapiens
CARDRTGAGDKNAFDVW

SEQ ID NO: 1062 - protein, 11 aa, Homo sapiens
CQQSYDTPQTF

SEQ ID NO: 1063 - protein, 23 aa, Homo sapiens
CARGASSTGTMGLRGKNDAFDIW

SEQ ID NO: 1064 - protein, 11 aa, Homo sapiens
CQVYISAPYTF

SEQ ID NO: 1065 - protein, 16 aa, Homo sapiens
CARGPYYYGNSHLDFW

SEQ ID NO: 1066 - protein, 11 aa, Homo sapiens [sequence omitted]

SEQ ID NO: 1067 - skipped

SEQ ID NO: 1068 - protein, 11 aa, Homo sapiens [sequence omitted]

SEQ ID NO: 1069 - protein, 14 aa, Homo sapiens
CARDGGWLRTLDSW

SEQ ID NO: 1070 - protein, 13 aa, Homo sapiens
CQYYVSSPRRFTF

SEQ ID NO: 1071 - protein, 16 aa, Homo sapiens
CASSSGSYYGDYFDYW

SEQ ID NO: 1072 - protein, 11 aa, Homo sapiens [sequence omitted]

SEQ ID NO: 1073 - protein, 17 aa, Homo sapiens
CARSTCGGSCYYRLDPW

SEQ ID NO: 1074 - protein, 11 aa, Homo sapiens [sequence omitted]

SEQ ID NO: 1075 - protein, 15 aa, Homo sapiens
CARSPGIAVGLIDYW

SEQ ID NO: 1076 - protein, 11 aa, Homo sapiens [sequence omitted]

SEQ ID NO: 1077 - protein, 25 aa, Homo sapiens
CARLGCGTTDCSPTWPYYYYGLDVW

SEQ ID NO: 1078 - protein, 10 aa, Homo sapiens [sequence omitted]

SEQ ID NO: 1079 - protein, 20 aa, Homo sapiens
CAKGLAYCSFGSCPYPLDYW

SEQ ID NO: 1080 - protein, 11 aa, Homo sapiens
CQQYVTSPRTF

SEQ ID NO: 1081 - protein, 25 aa, Homo sapiens
CARGRTSGSQDRLPLLWGLSGFDIW

SEQ ID NO: 1082 - protein, 10 aa, Homo sapiens
CQQSSNWVTF

SEQ ID NO: 1083 - protein, 15 aa, Homo sapiens
CTKAHSATHQGFDYW

SEQ ID NO: 1084 - protein, 12 aa, Homo sapiens
CQQYNGWPLYTF

SEQ ID NO: 1085 - protein, 22 aa, Homo sapiens
CVNGGRAFGVVIKYYYYGMDVW

SEQ ID NO: 1086 - protein, 11 aa, Homo sapiens [sequence omitted]

SEQ ID NO: 1087 - protein, 15 aa, Homo sapiens
CARDSEGSGWYFDYW

SEQ ID NO: 1088 - protein, 20 aa, Homo sapiens
CARRPSGFLEGYYYYYMDVW

SEQ ID NO: 1089 - protein, 11 aa, Homo sapiens [sequence omitted]

SEQ ID NO: 1090 - protein, 15 aa, Homo sapiens
CARDSEGSGWYFDYW

SEQ ID NO: 1091 - protein, 11 aa, Homo sapiens [sequence omitted]

SEQ ID NO: 1092 - protein, 13 aa, Homo sapiens
CALGLTSGWIDYW

SEQ ID NO: 1093 - protein, 10 aa, Homo sapiens [sequence omitted]

SEQ ID NO: 1094 - protein, 12 aa, Homo sapiens
CQHYNDWPSCSF

SEQ ID NO: 1095 - protein, 20 aa, Homo sapiens
CARAGLGTVDLRWGGAFDHW

SEQ ID NO: 1096 - protein, 11 aa, Homo sapiens [sequence omitted]

SEQ ID NO: 1097 - DNA, 364 bp, Homo sapiens
gaggtgcagctggtggagtctgggggaggcctggtcaagcctggggggtccctgagactctcctgtacagcctctggattcaacttcaacaaccatggcatgaactggctccgccaggctccagggaaggggctggagtgggtcgcttccattagcagtggtagtagatcccacttctacgcagactcactggagggccgattcaccgtctccagagataacgccaagaattccctttttctacaaatgaacagcctgagagccgaggacacggctgtctattactgtgcgagagaccgctacgctgactcgaattattactttgactcctggggcccgggaaccctggtcaccgtctcctcag

SEQ ID NO: 1098 - DNA, 325 bp, Homo sapiens
gaaatagtgatgacgcagtctccagccaccctgtctgtgtctccaggggaaagagccaccctctcctgcagggccagtcagagtgttagtagctacttagcctggtaccagcagaaacctggccaggctcccaggctcctcatctatcatgcatccaccagggccactggtatcccagccaggttcagtggcagtgggtctgggacagagttcactctcaccatcagcggcctgcagtctgaagattttgcagtttattactgtcagcagtatagtcagtggcctccgctcactttcggcggagggaccaaggtggagatcaaac

SEQ ID NO: 1099 - DNA, 375 bp, Homo sapiens
gaggtgcagctggtggagtcggggggaggcctggtcaagcctgaggggtccctgagactctcatgtgaagcctctggattcatcatcgatacctatagcatgaactgggtccgccaggctccagggaaggggctggaatgggtctcaaccattagtagtactagtaattacatatattacgcagactcagtgaagggccgattcaccatctccagagacaacgccaagaactcagtgtttctgcaaatgaacagcctgagagtcgaggacacggctatatattattgtgtgagagataatagtggttattacgaaaattaccactactacggcatggacgtctggggcaaagggaccacggtcaccgtctcctca

SEQ ID NO: 1100 - DNA, 322 bp, Homo sapiens
gacatccagttgacccagtctccatccttcctgtctgcatttgttggagacagagtcaccatcacttgccgggccagtcagggcattagcaattatttcgcctggtatcagcaaaaaccagggacagcccctaagctcctgatccacactgcatccactttgcaaagtggggtcccatcaaggttcagcggcagtggatctgggacagtgttcactctcacaatcagcagcctgcagcctgaagattttgcaacttattactgtcaacagcttaataattatccgtacacttttggccaggggaccaaggtggagatcaaac

SEQ ID NO: 1101 - DNA, 366 bp, Homo sapiens
caggtgcagctggtggagtctgggggaggcgtggtccagcctgggaggtccctgagactctcctgtgcagcctctggattcaccttcagtaattttggcatgtactgggtccgccaggctccaggcaagggactggactgggtggcagttatatcatatgatggaagtaatacatactatgcagactccgtgaagggccgattcaccatctccagagacaattccaagaacacgctgagtctgcaattgaacagcctgaaaccagtggacacggctgtgtattactgtgcgaaagccggattacagcgcttctccccccacttcatggatgtctggggcacagggaccacggtcaccgtctcctca

SEQ ID NO: 1102 - DNA, 325 bp, Homo sapiens
gacatccagatgacccagtctccttccaccctgtctgcatctgtaggagacagagtcaccatcacttgccgggccagtcagaatattaatacttggttggcctggtatcagcagaaaccaggggaagcccctaatctcttgatctttgatgcctccattttggaaagtgggggcccatcaaggttcagcggcagtgggtctgggacagaattcactctcaccatcagcagcctgcagcctgatgattttgcaacttattactgccaacagtatcatagtcattcaaagctcactttcggcggggggaccaaggtggaaatcaaac

SEQ ID NO: 1103 - DNA, 357 bp, Homo sapiens
aggtgcagctggtggagtcggggggaggcttggtcgagcctggggggtccctgagactctcctgtgcagcctctggattcaccttcagtgactaccaaatgagctggatccgccaggctccagggaaggggctggagtggctttcagacattactagtactggtaatgccaaatatcacgcagactctgtgaagggccgcttcaccgtctccagggacaacgccaagaggtcactgtatctacagatgaacagcctgagagccgaagacacggccgtctatttttgtgtgagagatctcgtctgggtccagttacctgactactggggccagggaaccctggtcaccgtctcctcag

SEQ ID NO: 1104 - DNA, 325 bp, Homo sapiens
gaaattgtgttgacgcagtctccaggcaccctgtctttgtctccaggggaaagagccaccctctcctgcagggccagtcagagtgttaccggcggctttttagcctggtaccagcagaagcctggccaggctcccaggctcctcatatatggtccatccagcagggccactggcatcccagacaggttcagtggcagtgggtctgggacagacttcactctcaccatcagcagactggagcctgaagattttgcagtgtattactgtcagcagtatgggagctcaccgacaacgttcggccaagggaccaaggtggaaatcaaac

SEQ ID NO: 1105 - DNA, 352 bp, Homo sapiens
gaggtgcagctggtggagtctgggggaggctgggtccagccgggggggtccctgagactctcctgtgaagcctctgggttcacctttagtttgttttggatgggctgggtccgccaggctccagggaaggggctggagtgggtggccaccatgaagcaagatggaagtgaatattactatgtggactctgtgaagggccgattcaccatctccagagacaaccccaagaactcactgtatctgcagatgaacagcctgagagccgaggacacggctgtctactattgtgcgagagatttcgaccgtggtgcagagcactggggccagggaaccctggtcaccgtctcctcag

SEQ ID NO: 1106 - DNA, 333 bp, Homo sapiens
ttgtgatgactcagtctccactctccctgcccgtcacccttggacagccggcctccatctcctgcaggtctagtcaaggcctcgtgtccagtgatggaagcacctacttgagctggtatcagcagaggccaggccaatctccgaggcgccttttttataaggtttctgcgcgggactctggggtcccagacagattcagcgccagtgggtcaggcactgatttcacactgaaaatcagcagggtggaggctgaggatgttggggtttattactgcttgcaaggaacacactggcctcgaacgttcggccaagggaccaaggtggaaatcaaac

SEQ ID NO: 1107 - DNA, 379 bp, Homo sapiens
caggtgcagctggtggagtctgggggaggcttggtcaagcctggagggtccctgagactctcctgtgcagcctctggtttcaccttcagtggttactacatgagctgggtccgccaggctccagggaaggggctggagtgggtttcatacattagtcatcgtggtaatatgatacactaccaggactctatgaagggccgattcatcatctccagggacaacgccaacaactcactttatctgcaaatgaacagcctgagagccgaggacacggccgtgtattactgtgcgagatactacttggcggggaattgtcgtacttccaactgttatgtctttgactactggggccggggaaccctggtcaccgtctcctcag

SEQ ID NO: 1108 - DNA, 322 bp, Homo sapiens
gacatccagttgacccagtctccatccttcctgtctgcatctgtaggagacagagtcaccatcacttgccgggccaatcagggcattagcagttctttagcctggtatcaacaaagaccagggaaagcccctaagctcctgatctatgctgcatccactttgcagagtggggtcccatcaaggttcagcggcagtggatctgggacagaattcactctcacaatcagcagcctgcagcctgaagattttgcatcttattactgtcaacaacttaatagtttccctcccacttttggccaggggaccaaggtggaaatcaaac

SEQ ID NO: 1109 - DNA, 384 bp, Homo sapiens
gaggtgcagctgttggagtctgggggaggcttggtacagccgggggggtccctgagactctcctgcgcagcctctggactcaattttatcagctatgccatgagttgggtccgccaggctccagggaggggactggagtgggtctcagttgtgagcggtactggtggaaccacattctacggagactccgtgcagggccggttcaccatctccagagacaactccaagaatatgttgtatctgcagatggacagcctgcgagccgaagacacggccaaatatttctgtgcgaagcatgtaactggttattatctaagtggtggagaggggggtggaggaacgttggacgtctggggcaaagggaccacggtcaccgtctcctca

SEQ ID NO: 1110 - DNA, 322 bp, Homo sapiens
gaaattgtgttgacacagtctccagccaccctgtctttgtctccaggggaaagagccaccctctcctgcagggccagtcaaagtgttagattttacttagcctggtaccagcagaaacctggccaggctcccaggctcctcatctatgatgcatccaccagggccactggcatcccggccaggttcagtggcagtgggtctgggacagacttctctctcaccatcagcagcctagagactgaagattttgcagtttattactgtcagcagcggatcaactggccgctcactttcggcggagggaccaaggtggagatcaaac

SEQ ID NO: 1111 - DNA, 343 bp, Homo sapiens
gaggtgcagctgttggagtctgggggagacttggtacaacctggggggtccctgagactctcctgtgttgtctctggatacacctttgactactctgccatgaattgggtccgccaggctccagggaaggggctggagtgggtctcaacaatttttggcgctgatgctcacacatattacgcagacgccgtgaagggccgattcaccatctccagagacagatccaagaacacactatatctgcaaatgagcagcctgcgagccgaagacacggccgtatattactgtgtaaaagatcaatgggattactggggccagggaaccctggtcaccgtctcctcag

SEQ ID NO: 1112 - DNA, 322 bp, Homo sapiens
gaaattgtgttgacacagtctccggccaccctgtctttgtctccaggggaaagagccaccctctcctgcagggccagtcagagtgttagccactacttagcctggttccaacaaaaacctggccagcctcccaggctcctcatttatgatgtttccaccagggccactggcatcccggccaggttcagtggcagtgggtctgggacagacttcactctcaccatcagcagcctagagcctgaagattttgcagtttattactgtcagcaacgtaacaactggcctctcactttcggcggagggaccaaggtggagatcaaac

SEQ ID NO: 1113 - DNA, 361 bp, Homo sapiens
caggtgcagctgcaggagtcgggcccaggactggtgaagccttcggggaccctgtccctcacctgcgctgtctctggtgtctccatcagcatgattaactggtggacttgggtccgccagcccccagggaaggggctggagtggattggggaaatctatcataatgggagcaccacctacaacccgtccctcaagactcgagtcaccatagcaatagacaagtccaagaaccagttctccctggagctgaactctgtgaccgccgcggacacggccatatattattgtgttgccgtggcttttcgcgcctacgccctttttgacgactggggccagggagccctggtcaccgtctcctcag

SEQ ID NO: 1114 - DNA, 325 bp, Homo sapiens
gaaattgtgttgacgcagtctccaggcaccctgtctttgtctccaggggaaagagccaccctctcctgcagggccagtcagagtattagcaacaactacttagcctggtaccagcagaaacctggccaggctcccaggctcctcatctatggtgcgttcagcagggccactggcatcccagacaggttcagtggcagtgggtctgggacagacttcactctcaccatcagcagactggagcctgaagattttgcagtgtatcactgtcagcagtatggtagttcacctaggacgttcggccaagggaccaaggtggaaatcaaac

SEQ ID NO: 1115 - DNA, 373 bp, Homo sapiens
gaggtgcagctggtgcagtctggagtagaggtgaagaagcccggggagtctctgaagatctcctgtaagggctctggatacagctttaccaactactggatcggctgggtgcgccaggtgcccgggaaaggcctggagtggatggggtccatctattctggtggctctactaccatttacagcccgtccttccaaggtcaggtcaccatctcagccgacaagtccaactccaccgcctaccttcaatggcgcagcctgaaggcctcggacaccgccatgtattactgtgcgagacatcaggtttcagccggctacactggttattaccactttgactactggggccagggaaccctggtcaccgtctcctcag

SEQ ID NO: 1116 - DNA, 340 bp, Homo sapiens
gacatcgtgatgacccagtctccagactccctggctgtgtctctgggcgagagggccaccatcaactgcaggtccagccagaatgttttacacagctccaagaataagaattacttgggttggtaccagcacaaaccaggacagcctcctaagttactcatttactgggcatctacccgggagtccggggtccctgatcgattcagtggcagcgggtctgggacaaatttcactctcaccatcagcagcctgcaggctgaagatgtggcactttattactgtcagcaatattatagtagtcccctcactttcggccctgggaccaaagtggatatcaaac

SEQ ID NO: 1117 - DNA, 363 bp, Homo sapiens
caggtgcagctgcaggagtcgggcccaggactggtgaagccttcggggaccctgtccctcacctgcgctgtctctggtgcctccatcagcagtactaactggtggagttgggtccgccagcccccagggaaggggctggagtggattggggaaatctatcataatgggagcaccaactacaatccgtccctcaagagtcgagtcaccatatcagtagacaagtccaagaaccagttctccctgaggctgagctctgtgaccgccgcggacacggccgtgtattactgtgcgagagagcggaatagagtatactactacggtatggacgtctggggcaaagggaccacggtcaccgtctcctca

SEQ ID NO: 1118 - DNA, 313 bp, Homo sapiens
gaaattgtgttgacacagtctccagccaccctgtctttgtctccaggggaaagagccaccctctcctgcagggccagtcagagtgttagcagctacttagcctggtaccaacagaaacctggccaggctcccaggctcctcatctatgatgcatccaacagggccactgacatcccagccaggttcagtggcagtgggtctgggacagacttcactctcaccatcagcagcctagagcctgaagattttgcagtttattactgtcagcagcgtagaaacactttcggcggagggaccaaggtggaaatcaaac

SEQ ID NO: 1119 - DNA, 364 bp, Homo sapiens
caggtgcagctggtgcagtctgggtctgagttgaagaagcctggggcctcagtgaaggtttcctgcaaggcttctggatacaccttcactacctattctatgaattgggtgcgacaggcccctggacaaggacttgagtggatgggatggatcaacacctacactgggaacccaacgtatgcccaggccttcacaggacggtttgtcttctccttggacacctctgtcagtacggcgtttctgcagatcaccagcctcaaggctgaggacactgccgtatattactgtgcgacaaggggacccgtggtcctaggtgaagcccttgcctactggggccagggagccctggtcaccgtctcctcag

SEQ ID NO: 1120 - DNA, 319 bp, Homo sapiens
gacatccagatgacccagtctccttccaccctgtctgcatctgtaggagacagagtctccatcacttgccgggccagtcagactattagtacttggttggcctggtatcagcagaaaccagggaaagcccctaagctcctgatctatgatgcctccactttggaaagtggggtcccatcaaggttcagcggcagtggatctgggacagaattcactctcaccatcagcagcctgcagcctgatgattttgcaacttattactgccaacagtataataattattctgggttcggccaagggaccaaggtggaaatcaaac

SEQ ID NO: 1121 - DNA, 364 bp, Homo sapiens
caggtgcagctggtgcagtctgggtctgagttgaagaagcctggggcctcagtgaaggtttcctgcaaggcttcaggatacaccttcactagctatgcaatgaattgggtgcgacaggcccctggacaagggcttgagtggatgggatggatcaacacctacactggcaacccaacgtatgcccaggccttcacaggacggtttgtcttctcctcggacacctctgccagcacggcgtatctgcagatcaacagcctaaaggctgaggacactgccgtatattactgtgcgacaaggggacccttagtcctaggtgaagcccttgactcctggggccagggaaccctggtcaccgtctcctcag

SEQ ID NO: 1122 - DNA, 319 bp, Homo sapiens
gacatccagatgacccagtctccttccaccctgtctgcatctgtaggagacagagtcaccatcacttgccgggccagtcagactattattagctggttggcctggtatcagcagaaaccagggaaagcccctaagctcctgatctatgatgcctccactttggaaagtggggtcccatcaaggttcagcggcagtggatctgggacagaattcactctcaccatcagcagcctgcagcctgatgattttgcaacttattactgccaacagtataatagttattctgggttcggccaagggaccaaggtggaaatcaaac

SEQ ID NO: 1123 - DNA, 370 bp, Homo sapiens
caggtgcagctggtgcagtctggaagtgaggtgaagaggccaggggcctcagtgcaggtctcctgcaagacttctggttacacttttagcgattatggtatgagttgggtgcgacaggcccctggacaaggacttgagtggatgggatggattaatgtgaacgttggcaacacaaactatgcacagaaattccagggcagagtctccgtgaccacagacacatccgcgggcacagcctacttggagttgaggagtctgacaagtgacgacacggcagtatattactgtgcgagagatgagggacaatatagaggtaattgggaccactttgactactggggccagggaaccctggtcaccgtctcctcag

SEQ ID NO: 1124 - DNA, 337 bp, Homo sapiens
gatgttgtgatgactcagtctccactcgccctgcccgtcacccttggacagtcggcctccatctcctgcaggtccagtcaaagcctcgtagacagagatggaaacatctacttgatttggtttcaccagaggccaggccaatctccaaggcgcctaatttatgaggtttctaagcgggactctggggtcccagacagaatcagcggcagtgggtcacacactgatttcacactgagaatcagcagggtggaggctgaggatgttggggtttattactgcatgcaggctacacactggcctaggacgttcggccaagggaccaaggtggaaatcaaac

SEQ ID NO: 1125 - DNA, 372 bp, Homo sapiens
caggtgcagctacagcagtggggcgcaggactgttgaagccttcggagaccctgtccctcacctgcgctgtctatggggggtccttcggtggttactactggaattggatccgtcagcccccagggaaggggctggagtggattggggaaatcaatcatagtggaagcaccaactacaacccgtccctcaagagtcgagtcaccctatcagtagacacgtccaagaaccaggtctccctgaacgtgagctctgtgaccgccgcggacacggctgtgtattactgtgcgagaggccgaggtggctacgccacctactactactactactacgtggacgtctggggcaaagggaccacggtcaccgtctcctca

SEQ ID NO: 1126 - DNA, 319 bp, Homo sapiens
gaaattgtgttgacacagtctccagccaccctgtctttgtctccaggggaaagagccaccctctcctgcagggccagtcagagtgttagcagctacttagcctggtatcaacagaaacctggccaggctcccaggctcctcatctatgatgcatccaagagggccactggcatcccagccaggttcagtggcagtgggtctgggacagacttcactctcaccatcagcagcctagagcctgaggattttgcagtttattactgtcagcagcgtagcaactggctcactttcggcggagggaccaaggtggaaatcaaac

SEQ ID NO: 1127 - DNA, 358 bp, Homo sapiens
gaggtgcagctggtggagtctgggggaggcctggtcaggccgggggggtccctgagactctcctgtgtagcctctggattcaccttcaacatcgatgccatgaactgggtccgccaggctccagggaaggggctggagtgggtctcatccattattcctagtggtacttacacatactacgtagactcagtgaagggccggttcaccatctccagagacaacgccgagggcacactgtctctgcagatgaacagcctgagagccgaggacacggctatatattactgtgcgagagaaccttacaatgatggttactttgagtcctggggccagggaaccctggtcaccgtctcctcag

SEQ ID NO: 1128 - DNA, 337 bp, Homo sapiens
gatattgtgatgactcagtctccactctccctgcccgtcacccctggagagccggcctccatctcctgcaggtctagtcagagcctcctgcatagtagtggatacaactatttagattggtacctgcagaagccagggcagtctccacaggtcctgatctatttgggttctactagggcctccggggtccctgacaggttcagtggcagtggatcaggcacagattttacactgaaaatcagcagagtggaggctgaggatgttggggtttattactgcatgcaagctctacaaactcctctaacttttggccaggggaccaaggtggaaatcaaac

SEQ ID NO: 1129 - DNA, 367 bp, Homo sapiens
caggtgcagctgcaggagtcgggcccaggactggtgaagccttcacagaccctgtccctcacctgcactgtctctggtgcctccatcaacagtggtggttactactggagctggatccgccagcacccagggaagggcctggagtggattgggtacatctatttcactgggagaaccaactacaacccgtccctcaagagtcgagttaccatatcaatagccacctctaagacccagttctccctgaagctgagctctgtgactgccgcggacacggccgtgtattactgtgcgagagaccagaatgactacggtgaagatcctttagatgtctggggccaagggacaatggtcaccgtctcttcag

SEQ ID NO: 1130 - DNA, 343 bp, Homo sapiens
gacatcgtgatgacccagtctccagactccctggctgtgcctctgggcgagagggccaccatcaactgcaagtccagccagagtgtttcatacagctccaccaataagaactgcttagcttggtaccagcagaaatcaggacagcctcctaaactgctcatttactgggcatctacccgggaatccggggtccctgaccgattcagtggcagcgggtctgggacagatttcactctcaccatcagcagcctgcaggctgaagatgtggcaatttattactgtcagcaatattgtggtactcccttgtacacttttggccaggggaccaaggtggaaatcaaac

SEQ ID NO: 1131 - DNA, 390 bp, Homo sapiens
caggtgcagctgcaggagtcgggcccaggactggtgaagccttcggagaccctgtccctcacctgctctgtctctggtggctccgtcagcagtggtatttaccactggacctggattcggcagcccccagggaagggactggagtggattggctatatctattacagtgggagcacgtattacaacccctccctcaagagtcgagtcaccatttcactcgacacgtccaagaaccacttctccctgaggctgagctctgtgaccgctgcggacacggccgtatattactgtgcgagacaagttttttatgacaacgatgaccacgacgggttgggctactactacggtctggacgtctggggcaaagggaccacggtcaccgtctcctca

SEQ ID NO: 1132 - DNA, 319 bp, Homo sapiens
gaaatagtgatgacgcagtctccagccaccctgtctgtgtctccaggggaaagagccaccctctcctgcagggccagtaagagtattagcagcaacttagcctggtaccagcaggaacctggccaggctcccaggctcctcatctatggtgcatccaccagggccactggtatcccagccaggttcagtggcagtgggtctgggacagagttcactctcaccatcagcagcctgcagtctgaagattttgcagtttattactgtcagcagtataataactggcccactttcggccaagggaccaaggtggaaatcaaac

SEQ ID NO: 1133 - DNA, 378 bp, Homo sapiens
caggtgcagctggtgcagtctgggactgaggtgaagaagcctgagtcctcggtgaaggtctcctgcgaggcttctggaggccccttcggcagctatgctgtcagctgggtgcgacaggcccctggacaacgacttgagtggattggagggatcatccctatctttgggacaccatactacgcgcagaaattccagggcagaatcacgattaccgcggacgaatccacgagcacagcctacatggagttgagcagcttgagatctgacgacacggccgtgtattactgtgggagagcgaggcggcaggtgacactggataactccttctcataccctatggacgtctggggccaagggaccacggtcaccgtctcctca

SEQ ID NO: 1134 - DNA, 322 bp, Homo sapiens
gacatccagatgacccagtctccatcctccctgtctgcatctgtgggagacagagtcaccttcacttgccaggcgagtcaggacattagcaactctttaaattggtatcagcagaaaccagggaaagccccaaacatcctaatttacgatgcatccaatttggaaacaggggtcccatcaaggttcagtggaagtggatctgggacagattttactttcaccatcaccagcctgcagcctgaagatattgcaacatattactgtcaacactatgataatgtccctcccactttcggcggagggaccaaggtggaaatcaaac

SEQ ID NO: 1135 - DNA, 370 bp, Homo sapiens
caggtgcagctggtgcagtctggggctgagctgaagaagcctgggtcctcggtgaaggtctcctgcaagacttctggaggcacctccaacaactatcctatcagctgggtgcgacaggcccctggacaaggacttgagtggatgggagggtccatccctatctttaatacaccaaagtatggaaagaagttccagggcagagtcacgatcacctcggacacatccacgagcacagcctacatggagctgagcagcctgcgatctgacgacacggccatttattactgtgcgaccagtgccggcgggatagtgaactacttcctcctttttgatatttggggccaagggacaatggtcaccgtctcttcag

SEQ ID NO: 1136 - DNA, 322 bp, Homo sapiens
gacatccagatgacccagtctccttccaccctgtctgcatctgtaggagacagagtcaccatcgcttgccgggccagtcagagtattagtgactggttggcctggtatcagcagaaaccaggaaaagcccctaaactcctgatccataaggcgtctagtttagaaagtggggtcccatcaaggttcagcggcggtggatctgggacagaattcactctcaccatcagcagcctgcaggcagatgattctgcaacttattactgccaacactataatacttattcggggacgttcggccaagggaccaaggtggagatcaaac

SEQ ID NO: 1137 - DNA, 381 bp, Homo sapiens
cggctgcagctgcaggagtcgggcccaggactggtgaagccttcggagaccctgtccctcacctgcactgcctctggtggctccgtcaacagcggtggttactactggggctggatccgccagcccccagggaaggggccggagtggattgggactatctataacagtgggagtgtcgactacaatccgtccctcaagagtcgagtcgccatatcaatagacacgttcgagaatcagttctccctgaagctgagttctgtgaccgccgcggacacggccgtctattactgtgcgagagtgaacatatatctcgtcaccgtggaggagtatcactacggaatggacgtgtggggcctagggaccacggtcaccgtctcctca

SEQ ID NO: 1138 - DNA, 328 bp, Homo sapiens
gaaatagtgatgacgcagtctccagccaccgtgtctgtgtctccaggggaaagagccaccctctcctgcagggccagtcagagtgttaccaacaacgtagcctggtaccagcagaaacctggccaggctcccaggctcctcatctatggtgcgtccaccagggccactggtatcccagccaggttcagtggcagtgggtctgggacagacttcattctcaccatcagcagcctgcagtctgaagattttgcactttattactgtcagcactacaataggtggcctttggggttcactttcggcccggggaccaaagtggatatcaaac

SEQ ID NO: 1139 - DNA, 358 bp, Homo sapiens
gaagtgcagctggtggagtctgggggaggcttggtacagcctggcaggtccctgcgactctcctgcgcagcctctggattcacctttgatgattatgccatgacgtgggtccggcaggctccagggaagggcctggagtgggtctcaggtattagctgggatagtggtgctataggctatgcggactctgtgaagggccgattcaccatctccagagacaacgccaagaactccctatatttgcaaatgaacagtctgagaactgaggacacggccttgtatttctgtgcaagaagtaatggtgcggggagttactctgaatcctggggccagggaaccctggtcaccgtctcctcag

SEQ ID NO: 1140 - DNA, 319 bp, Homo sapiens
gaaatagtgatgacgcagtctccagccaccctgtctgtgtctccaggggaaagagccaccctctcttgcagggccagtgagggtattagcagccacttagcctggtaccagcagagacctggccaggctcccaggctcctcatctatggtgcatccacgagggccactggtatcccagccaggttccgcggcagtgggtctgggacagacttcactctcaccatcagcagcgtgcagtctgaagattttgcagtttattactgtcagcagtataataactggccccatttcggcggagggaccaaggtggaaatcaaac

SEQ ID NO: 1141 - DNA, 364 bp, Homo sapiens
caggtgcagctgcaggagtcgggcccaggactggtgaagccttcggagaccctgtccctcacctgcgctgtctctggttattccatcagcagtggttactactggggctggatccggcagcccccagggaaggggctggagtggattgggagtatctattatagtgggagcacgtactacaacccgtccctcaagagtcgagtcaccatatcagtagacacgtccaagaaccagttctccctgaagttgagttctgtgaccgccgcagacacggccgtgtattactgtgcgagaggtagaggggctacggtgactactcactttgactactggggccagggaaccctggtcaccgtctcctcag

SEQ ID NO: 1142 - DNA, 340 bp, Homo sapiens
gatattgtgatgacccagactccactctcctcacctgtcacccttggacagccggcctccatctcctgcaggtctagtcaaagcctcgtacacagtgatggaaacacctacttgagttggcttcagcagaggccaggccagcctccaagactcctaatttataagatttctaaccggttctctggggtcccagacagattcagtggcagtggggcagggacagatttcacactgaaaatcagcagggtggaagctgaggatgtcggggtttattactgcatgcaagctacacaatttccctcgatcaccttcggccaagggacacgactggagattaaac

SEQ ID NO: 1143 - DNA, 370 bp, Homo sapiens
caggtgcagctggtgcagtctggagctgaggtgaagaagcctggggcctcagtgaaggtctcctgtcaggcttctggttatacctttagcagctatggtatcagctgggtgcgacaggcccctggacaagggcttgagtggatgggatggatcagcgcttacagtggtaacacaaactatgcacaaaaggtccaagacagagtcaccatgaccacagaaacatccacgagcacagcctacatggagctgaggagcctgagatctgacgacacggccatgtattactgtgcgagaatgggtattgtagtcgcaccagctgtggggtctcttgactactggggccagggaaccctggtcaccgtctcctcag

SEQ ID NO: 1144 - DNA, 325 bp, Homo sapiens
gaaattgtgttgacgcagtctccaggcaccctgtctttgtctccaggggaaagagccaccctctcctgcagggccagtcagagtattagcagcagttacttagcctggtaccagcggaaacctggccaggctcccaggctcctcatctatggtgcatccagcagggccactggcatcccagacaggttcagtggcggtgggtctgggacagacttcactctcaccatcagcagactggagcctgaagattttggagtgtattactgccagcagtatggtacctcaccgtggacgttcggccaagggaccaaggtggaaatcaaac

SEQ ID NO: 1145 - DNA, 367 bp, Homo sapiens
caggtgcagctgcaggagtcgggcccaggactggtgaggccttcacagaccctgtccctcacctgcactgtctctggcgactccatcaatagtggtggttactactggaattggatccgccagcccccagggaagggccttgagtggattggatacatctatttcactgggaggaccaactacaacccgtccctcgggagtcgagtgacgatatcactagattcgtctaagacgcagttctccctgaaactgacctctatgacggccgcggacacggccgtgtattactgtgcgagagatcgtcatgactacggtgaagatccctttgatatctggggccaagggacaatggtcaccgtctcttcag

SEQ ID NO: 1146 - DNA, 322 bp, Homo sapiens
gacatccagatgacccagtctccatcctccctgtctgcatctgtaggagacagaatcaccatcacttgccgggcgagtcagggcattaggaactatgtagcctggtatcagcagaaaccaggtagagttcctaagctcctgatctatgctgcttccactttgcaatcgggggtcccatcccgcttcagtggcagtggatctgggacagagttcactctcaccatcagcagcctgcaggctgaagatgttgcaacttattactgtcaaaagtataacagtgtcccgctcactttcggcggagggaccaaggtggaaatcaaac

SEQ ID NO: 1147 - DNA, 370 bp, Homo sapiens
caggtgcagctggtgcagtctggggctgaggtaaagaagcctgggtcctccgtgaaggtctcctgcaaggcctctgggatgacctcgaacagccttgccatcagctgggtgcgacaggcccctggacaaggacttgagtggatgggaggcatcatccctgtctttgaaaccccaaaatacgcacagaaattccagggcagagtcaccattaccgcggacaaatccacgaacacagcctacatggacctgatcagcctcaaatctgaagacacggccatgtattattgtgcgaccagtgctggcgggattgtaaattattatctcagttttaatatctggggccaggggacaatggtcaccgtctcttcag

SEQ ID NO: 1148 - DNA, 322 bp, Homo sapiens
gacatccagatgacccagtctccttccactctgtctgcgtctgtgggagacagagtcaccatcacttgccgggccagtcagactattactacgtggctggcctggtatcagcagaaaccagggcaagcccctaagctcctcatccataagacatctactttagaaactggggtcccgtcgaggttcagcggcagtggatctgggacacaattcactctcaccatcaccaacctgcagcctgatgattctgcaacttattactgccaacaatacagtacttattcggggacattcggccaagggaccaaggtggaaatcaaac

SEQ ID NO: 1149 - DNA, 393 bp, Homo sapiens
caggtgcagctgcaggagtcgggcccaggactggtgaagccttcacagaccctgtccctcacctgcactgtctctggtgcctccatcagcagtggtgattcctactggagttggatccgccagcccccagggaagggcctggagtggattgggtacatctctaacagtgggagcaccgactacaacccgtccctcaagagtcgagtaagcatatcagtagacacgtcgaagagccagttctccctgaagctgagctctgtggatgccgcagacacggccgtgtattactgtgccagagattcacgacttctggagtggtttacggtcgatagcccgtatgactactacgctatggacgtctggggccaagggaccacggtcaccgtctcctca

SEQ ID NO: 1150 - DNA, 322 bp, Homo sapiens
gacatccagatgacccagtctccatcctccctgtctgcatctgtaggagacagagtcactatcacttgccgggcaggtcagaacgttagagactatttaaattggtatcagcagaaaccagggaaagccccgaagctcctgatctacactgcatccagtttgcaaagtggagtcccatcaaggttcagtggcagtggatctgggacagacttcactctcaccatcagcagtctgcaacctgaagattttgcaacttactactgtcaacagacttacagtccccctaggacgttcggccaagggaccaaggtggaaatcaaac

SEQ ID NO: 1151 - DNA, 361 bp, Homo sapiens
caggtgcagctggtgcagtctggggctgaggtgaagaagcctgggtcctcggtgaaggtctcctgtaaggcttctggaggcagcttcagcacctatgctatcaactgggtgcgacaggcccctggacaagggcttgagtggatgggaggcatcattcctgtcgttggtagagcagactacgcacagaagtttcggggcagagtcacgataacagcggacgaattcacaagcacagcctacatggagctgagcagcctgagatctgaggacacggccgtgtattactgtgcgagagataggagcgacgaagactacgatattggctactggggccagggaaccctggtcaccgtctcctcag

SEQ ID NO: 1152 - DNA, 340 bp, Homo sapiens
gacatcgtgatgacccagtctccagactccctggctgtgtctctgggcgagagggccaccatcaactgcaagtccagccagagtgttttgttcagctccaacaataagcactacttggcttggttccagcaaaaaccaggacagccccctaaactgctcatttactgggcatctacccgggaatccggggtccctgaccgattcagtggcagcgggtctgggacagatttcactctcaccatcaccagcctgcagcctgaggatgtggcagtttattactgtcagcaatattatagtacttcgtggacgttcggccaagggaccaaggtggagatcaaac

SEQ ID NO: 1153 - DNA, 364 bp, Homo sapiens
caggtgcagctgcaggagtcgggcccaggactggtgaagccttcggagaccctgtccctcacctgcactgtctctggtgattccatcaggaattactactggagctggatccggcaggccccagggaagggactggagtccattggatatatctattacagtggaagagccaagtacaacccctccctcgagagtcgagtcaccatgtcagtagacacgtccaagaaccagttctccctgaaattgacctctgtgaccgccgcggacacggccgtctattactgtgcgagagataggacgggggcgggggacaaaaatgcttttgatgtctggggcccagggacaatggtcaccgtctcttcag

SEQ ID NO: 1154 - DNA, 322 bp, Homo sapiens
gacatccagatgacccagtctccatcctccctgtctgcatctgtcggagacagagtcaccatcacttgccgggcgagtcagaccattaaaaaatatttaaattggtatcagcaggaaccagggaaagcccctaaactcctgatctatactgcatccagtttgcaaagtgggatcccatcaaggttcagtggcagtggctctgggacagatttcactcttatcatcaccagtctgcaacctgaagatgttgcaacttactactgtcaacagagttacgatacccctcagacgttcggccgagggaccaaggtggaaatcaaac

SEQ ID NO: 1155 - DNA, 385 bp, Homo sapiens
caggtgcagctggtgcagtctggagctgaggtgaagaggcctggggcctcagtgaggatcgcctgcaaggcttctggtgacactttaacaagttttggttttagttgggtgcgacaggcccgtggacaaggacttgagtggatgggatggatcaacggttacaatagtaacccaaactatgcacagatcttccaggacagagtcaccttgaccatcgacacatacacgagcacagcctacatggagtttaggagcctggtgtctgacgacacgggcatatattattgtgcgagaggagcgagttcaacgggaacgatgggattgcgcgggaaaaatgatgcctttgatatctggggccaagggacaatggtcaccgtctcttcag

SEQ ID NO: 1156 - DNA, 322 bp, Homo sapiens
gacatccagatgacccagtctccatcgtccctgtctgcatctgtaggagacagagtcaccatcacttgccgggcgagtcggggcattgccgattatttagcctggtatcagcagaaaccagggaaagttcctcagctcctgatctatgctgcgtccactttgcagtcaggggtcccatctcggttcagtggcagtggatctgggacagttttcactctcaccatcagccgcctgcagcctgaagatgttgcaacttattactgtcaagtgtatatcagtgccccgtacacttttggccaggggaccaaggtggagatcaaac

SEQ ID NO: 1157 - DNA, 364 bp, Homo sapiens
caggtgcagctggtgcagtctggggctgaggtgaagaagcctgggtcctcggtgaaggtctcctgcagggcctctggaggcattttcagaagtaatgctatcagctgggtgcgacaggcccctggacaagggcttgagtggatgggagaaatcatcgctgtctttggtacagcaaactacgcacagaagttccagggcagagtcactattaccgcggacgaatccacgagcacagcctacatggagctgagcagcctgagatctgaggacacggccgtgtattactgtgcgaggggcccttattattatggtaatagccaccttgacttctggggccagggaacaatggtcaccgtctcttcag

SEQ ID NO: 1158 - DNA, 325 bp, Homo sapiens
gaaattgtgttgacgcagtctccaggcaccctgtctttgtctccaggggaaagagccaccctctcctgcagggccagtcagagtgttagcagcaactatttagcctggtaccagcaaaaacctggccaggctcccaggctcctcatctatggtgcatccaacagggccactggcatccctgacaggttcagtggcagtgggtctgggacagacttcactctcgccatcagcagactggagcctgaagattttgcagtgtattactgtcagcagtatggtacctcacctcggacgttcggccaagggaccaaggtggaaatcaaac

SEQ ID NO: 1159 - DNA, 328 bp, Homo sapiens
caggtgcagctggtgcagtctgggactgaggtgaagaagcctgggtcgtcggtgaggatctcctgcgaggcctctggagccaccttcagcagtcttgggatcaattggttccgtctgggccctggacaagggcttgagtggatgggagcgcccatccctctctctgggacaccaacctacgcacagaagttccagggcagactcacaatcacatcgggcttcatggagctgagcagcctgacgtctgaagacacggccatgtatttctgtgcgagaaaggatgcaggaagtgcctataaaagttttgatgtctggggccaagggacaa

SEQ ID NO: 1160 - DNA, 337 bp, Homo sapiens
gatattgtgatgactcagtctccactctccctgcccgccacccctggagagtcggcctccatctcctgcaggtctagtcagatcctcctgcatggaaatggaaacaactatttggattggtacgtgcagaagcccggtcagtctccgcagctgttgatctatttgggttctagacgggcctccggggtccctgacaggttcagtggcagtggatcaggcacagattttgcactgaaaatcagcagagtggaggctgaggatgttggagtttattactgcatgcaatctctacaaactcctccgacgttcggccaagggaccaaggtggaaatcaaac

SEQ ID NO: 1161 - DNA, 358 bp, Homo sapiens
caggtgcagctggtgcagtctggggctgaagtgaagaagcctgggtcctcggtgaaggtctcctgcaaggcttctggaggcaccttcggcagttatggtattaactgggtgcgacaggcccctggacaagggcttgagtggatgggaggcatcactcctatagatgggataccaaattacgcacagaagtttcagggcagcgtcacgattaccgcggacgaatccacgagaacagcctacatggaactcagcagcctgacatctgaggacacggccatgtattactgtgcgagagatggagggtggctacgaacccttgactcctggggccagggaaccctggtcaccgtctcctcag

SEQ ID NO: 1162 - DNA, 331 bp, Homo sapiens
gaaattgtgttgacgcagtctccaggcaccctgtctttgtctccaggggacagagccaccctctcctgcagggccagtcagagggttagcaacaatttcttagcctggtatcagcagaaacctggcctggctcccagactcctcttctatggtgtatccaccagggccactggcatcccagacaggttcagtggcagtgggtctgggacagacttcactctcaccatcagcagactggagcctgaggattttgcagtctattactgtcagtactatgttagttcaccgaggagattcactttcggccctgggaccaaagtggatatcaaac

SEQ ID NO: 1163 - DNA, 364 bp, Homo sapiens
caggtgcagctggtgcagtctggggctgaggtgaagaagcctgggtcctcggtgaaggtctcctgcaaggcctctggaggcaccttcagaaactttgctgtcagctgggtgcgacaggcccctggacaagggcctgagtggatgggagggatcatcgccatctttggtacagcaaagtacgcacagaagttccagggcagagtcacaatttcggcggacgagtccacgaggatagtccagatggagctgagcagcctgagatctgacgacacggccatttattactgtgcgagctccagtgggagttactacggcgactactttgactactggggccagggaaccctggtcaccgtctcctcag

SEQ ID NO: 1164 - DNA, 322 bp, Homo sapiens
gaaatagtgatgacgcagtctccagccaccctgtctgtgtctccaggggaaagagccaccctctcctgcagggccagtcagagtgttagcagtaacttagcctggtaccagcagacacctggccaggctcccaggctcctcatctatgctgcatcctccagggccactggtatcccagccaggttcagtggcagtgggtctgggacagagttcactctcagcatcagcagcctacagcctgaagattttgcagtttattactgtcagcagtataataactggcctcggacgttcggccaggggaccaaggtggagatcaaac

SEQ ID NO: 1165 - DNA, 367 bp, Homo sapiens
gaggtgcagctgttggagtctgggggaggcttggtacagcctggggggtccctgagactctcctgtgcagcctctggattcacctttagcagctatgccatgagctgggtccgccaggctccagggaaggggctggagtgggtctcagctattagtggtagtggtggtagcacatactacgcagactccgtgaagggccggttcaccgtctccagagacaattccaagagcacactgtatctacaaatgaacagcctgagacccgaggacacggccatatattactgtgcgaggtcaacgtgtggcggtagttgctactacaggctcgacccctggggccagggaaccctggtcaccgtctcctcag

SEQ ID NO: 1166 - DNA, 337 bp, Homo sapiens
gatattgtgatgactcagtctccactctccctgcccgtcacccctggagagccggcctccatctcctgcaggtctagtcagagcctcctacatactaatggatacagctatgtggattggtacctgcagaagccagggcagtctccacagctcctgatctatttggtttctaatcgggcctccggggtccctgacaggttcagtggcagtggatcaggcacagattttacactgaaaatcagcagagtggaggctgaggatgttggcgtttattactgcatgcaacctctacaaactccattcactttcggccctgggaccaaagtggatatcaaac

SEQ ID NO: 1167 - DNA, 361 bp, Homo sapiens
gaggtgcagctggtggagtctgggggaggcctggtcaagccggggggctccctgagactctcctgtgcagcctctggattctactttagtgactatggcatgaactgggtccgccagtctgcagggagggggctggagtggatctcatacattgccagtagtggtagtaacatatactacgcagactcagtgaagggccggttcaccatctccagagacgacgccaagaactcactatttctgcacatgaacagcctgagagccgaggacacggctgtgtattactgtgcgagaagtccgggtatagccgtgggacttattgactactggggccagggatccctggtcaccgtctcctcag

SEQ ID NO: 1168 - DNA, 325 bp, Homo sapiens
gaaattgtgttgacgcagtctccaggcacactgtctttgtctccaggggaaagagccaccctctcctgcagggccagtcagactgttagcagcaccttcttagcctggtatcagcagaaacctggccaggctcccaggctcctcatctttggtgcatctaccagggccgctggcatcccagacaggttcagtggcagtgggtctgggacagacttcactctcaccatcagcagactggagcctgaagattttgcagtgtattactgtcagcagtatggcaggtcacctcggacgttcggccaagggaccaaggtggaaatcaaac

SEQ ID NO: 1169 - DNA, 390 bp, Homo sapiens
gaggtgcagctggtgcagtctggagcagaggtgaaaaagcccggggggtctctgaagatctcctgtaagacttctggatacagctttaacacctactggatcggctgggtgcgccaggtgcccgggaaaggcctggagtggatgggcatgatctatcctggtgactctgataccagatacggcccgtccttccaaggccaggtcaccatctcagccgacaagtccgtcacaaccgcctacttgcgctggagcagtgtgcaggcctcggacagcgccatatattactgtgcgagactgggctgtggtacaaccgactgctcccctacttggccctactactactacggtctggacgtctggggccaggggaccacggtcaccgtctcctca

SEQ ID NO: 1170 - DNA, 322 bp, Homo sapiens
gaaattgtgttgacgcagtctccaggtaccctgtctttgtctccaggggaaagagccaccctctcctgcagggccagtcagactgttagcggcagcttcttagcctggtaccagcagaaacctggccaggctcccaggctcctcatttatggtgcatccagcaggcccactggcatcccagacagattcagtggcagtgggtctgggacacacttcactctcaccatcaccagactggagcctgaagattttgcagtatattactgtcagcagtatggtcgctctcccaccttcggccaagggacacgactggagattaaac

SEQ ID NO: 1171 - DNA, 376 bp, Homo sapiens
gaggtgcagctgttggagtctgggggaggcttggtacagcctggggggtccctgagactctcctgtgaagcctccggattcacctttacgagctttggcatgaattgggtccgccaggctccagggaaggggctggagtgggtcgcagtcattagtggaagtgacggtagcacatactacgcggactccgtgaagggccgattcaccatctccagagacaattccaacaacacggtgtatctgcaaatgaacgggctgagagtcgaggacacggccgtatattactgtgcgaaaggcctcgcatattgtagttttggtagctgcccttaccctcttgactattggggccagggaaccctggtcaccgtctcctcag

SEQ ID NO: 1172 - DNA, 340 bp, Homo sapiens
gacatcgtgatgacccagtctccagactccctggctgtgtctctgggcgagacggccaccatcaactgcaggtccagccagagtgttttatatccttccaacagtaggaactacttagcttggtaccagcagaaaccaggacagcctcctaaactgctcatttactgggcatctacccgggattccggggtccctgaccgattcagtggcagcgggtctggggcagatttcactctcaccattaccagcctgcaggctgaagatgtggcagtctattactgtcagcaatatgttacttctcctcggacttttggccaggggaccaaggtggaaatcaaac

SEQ ID NO: 1173 - DNA, 391 bp, Homo sapiens
caggtgcagctggtgcagtctggggctgaggtgaagatgcctgggtcctcggtgaaggtctcctgcagggcttctggaggcaccttcagcacctatactatcacctgggtgcgacaggcccctggacaagggcttgagtggatgggagtcatctaccctgtctttggttcggcaaactacgcacagaacttccagggcagactcatgattaccgcggacgaatccccgagcacagcctacatggagctgagcagcctcagatctgaggacacggccgtctattattgtgcgagaggaaggactagtgggagccaagaccgactcccacttctctggggtctgagtggttttgatatctggggccaagggacaatggtcaccgtctcttcag

SEQ ID NO: 1174 - DNA, 319 bp, Homo sapiens
gaaattgtgttgacacagtctccagccaccctgtctttgtctgcaggggaaagagccaccctctcctgcagggccagtcagagtgttagcagctacttagcctggtaccaacagaaacctggccaggctcccaggctcctcatctttgatgcatccaacagggcctctggcatcccagccaggttcagtggcagtgggtctgggacagacttcactctcaccatcagcagcctagagcctgaagattttgcagtttattactgtcagcagagtagcaactgggtcactttcggcgcagggaccaaggtggaaatcaaac

SEQ ID NO: 1175 - DNA, 361 bp, Homo sapiens
gaagtgcagctggtggagtctgggggaggcttggtacagcccggcgggtccctgagactctcctgtgcagtctctggattcagatttgaagactatgccatgcactgggtccggcaagctccagggaagggcctggagtgggtctcaggtattagttggaatagtggtgctataggctatgcagactctgtggagggccgattcaccatctccagagacaacgccaagaactccctctatctgcaaatgaacaatctgagagttgaggacacggccttgtattactgtacaaaagctcacagtgcgacccaccagggctttgactactggggccagggaagcctggtcaccgtctcctcag

SEQ ID NO: 1176 - DNA, 325 bp, Homo sapiens
gaaatagtgatgacgcagtctccagccaccctgtctgtgtctccaggtgaaagagccaccctctcctgcagggccagtcagagtgctagcaacaacttagcctggtaccagcagaaacctggccagactcccaggctcctcatctatggtgtttccaccagggccactggtgtcccagccaggttcagtggcagtgggtctgggacagagttcactctcaccatcagcagcctgcagtctgaagattttgcagtttattactgtcaacagtataatggctggcccctgtacacttttggccaggggaccaaggtggagatcaaac

SEQ ID NO: 1177 - DNA, 381 bp, Homo sapiens
gaggtgcagctggtggagtctgggggaggcttggtccagcctggggggtccctgagactctcctgttcagcctctggattcaccttcagtagctatgctatgcactgggtccgccaggctccagggaagggactggaatatgtttcagctattagtagtaatgggggtagcacatactacgcagactcagtgaagggcagattcaccatctccagagacaattccaagaacacgctgtatcttcaaatgagcagtctgagagctgaggacacggctgtgtattactgtgtgaatgggggtcgggcttttggagtggttattaaatactactactacggtatggacgtctggggccaagggaccacggtcaccgtctcctca

SEQ ID NO: 1178 - DNA, 322 bp, Homo sapiens
gacatccagatgacccagtctccatcctccctgtctgcatctgtaggagacagagtcaccatcacttgccgggcaagtcagagcattagcatctctttaaaatggtatcagcagaaaccagggaaagcccctaagctcctgatctatgctgcatccagtttgcaaagtggggtcccatcaaggttcagtggcagtggatctgggacagatttcactctcaccatcagcagtctgcaacctgaagattttgcaacttactactgtcaacagagttacagtactcccatcaccttcggccaagggacacgactggagattaaac

SEQ ID NO: 1179 - DNA, 361 bp, Homo sapiens
caggtgcagctggtggagtctgggggaggcgtggtccagcctgggaggtccctgagactctcctgtgcagcgtctggattcaccttcagtacctatggcatgcactgggtccgccaggctccaggcaaggggctggagtgggtggcagttatatggtatgatggaagtaataaatactatgcagactccgtgaagggccgattcaccatctccagagacaattccaagaacacgctgtatctgcaaatgaacagcctgagagccgaggacacggctgtgtattactgtgcgagagatagtgagggcagtggctggtactttgactactggggccagggaaccctggtcaccgtctcctcag

SEQ ID NO: 1180 - DNA, 375 bp, Homo sapiens
gaggtgcagctggtggagtctgggggaggcctggtcaagcctggggggtccctgagactctcctgtgcagcctctggattcaccttcagttcctatagcatgaactgggtccgccaggctccagggaaggggctggagtgggtctcatccattagtagtagtagtagttacatatactacgcagactcagtgaagggccgattcaccatctccagagacaacgccaagaactcactgtatctgcaaatgaacagcctgagagccgaggacacggctgtgtattactgtgcgagacgaccttccggatttttggaggggtactactactactacatggacgtctggggcaaagggaccacggtcaccgtctcctca

SEQ ID NO: 1181 - DNA, 322 bp, Homo sapiens
gaaatagtgatgacgcagtctccagccaccctgtctgtgtctccaggggaaagagccaccctctcctgcagggccagtcagagtgttagcagcaacttagcctggtaccagcagaaacctggccaggctcccaggctcctcatctatggtgcatccaccagggccactggtatcccagccaggttcagtggcagtgggtctgggacagagttcactctcaccatcagcagcctgcagtctgaagattttgcagtttattactgtcagcagtataataactggcccctcactttcggcggagggaccaaggtggagatcaaac

SEQ ID NO: 1182 - DNA, 361 bp, Homo sapiens; identical to SEQ ID NO: 1179

SEQ ID NO: 1183 - DNA, 322 bp, Homo sapiens
gacatccagatgacccagtctccatcctccctgtctgcatctgtaggagacagagtcaccatcacttgccgggcaagtcagagcattagcatctctttaaattggtatcagcagaaaccagggaaagcccctaagctcctgatctatgctgcatccagtttgcaaagtggggtcccatcaaggttcagtggcagtggatctgggacagatttcactctcaccatcagcagtctgcaacctgaagattttgcaacttactactgtcaacagagttacagtactcccatcaccttcggccaagggacacgactggagattaaac

SEQ ID NO: 1184 - DNA, 355 bp, Homo sapiens
caggtgcagctgcaggagtcgggcccaggactggtgaagccttcggacaccctgttcctcacctgcgctgtctctggttactccatcgacagtggtcactggtggggctggatccggcagcccccagggacgggactggagtacattggttacacctattatagtgggagcacctacgccaatccgtccctcaggagtcgaatcaccatgtcactagacacgtccaagaaccagttctccctgaaagtcagctctgtgaccgccgtggacacggccgtctattactgtgcgctaggcctgaccagtggctggattgactactggggacagggaatcctggtcaccgtctcctcag

SEQ ID NO: 1185 - DNA, 319 bp, Homo sapiens
gacatccagatgacccagtctccttccacgctgtctgcatctgtaggagacagagtcaccatcacttgccgggccagtcagagcattagtaactggttggcctggtatcagcagaaaccagggaaagcccctaagctcctgatctataaggcgtctactttacaaagtggggtcccatcaaggttcagcggcagtggatctgggacagaattcacgctcaccatcaacagcctgcagcctgatgattttgcaacttattactgccaacaatataatagttttcggacattcggccaggggaccaaggtggaaatcaaac

SEQ ID NO: 1186 - DNA, 520 bp, Homo sapiens
gaaatagtgatgacgcagtctccagccaccctgtctgtgtctccaggggaaagagccaccctctcctgcagggccagtcagagtgttagcagcaacttagcctggtaccagaacaaacctggccaggctcccagactcctcatctatggtgcatccaccagggccactggtgtcccagccaggttcagtggcagtgggtctgggacagaattcactctcagcatcagcagcctgcagtctgaagattttgcagtttattactgtcaacactataatgactggccttcgtgcagttttggccaggggaccaagctggagatcacacgaactgtggctgcaccatctgtcttcatcttcccgccatctgatgagcagttgaaatctggaactgcctctgttgtgtgcctgctgaataacttctatcccagagaggccaaagtacagtggaaggtggataacgccctccaatcgggtaactcccaggagagtgtcacagagcaggacagcaagggacagcacc

SEQ ID NO: 1187 - DNA, 376 bp, Homo sapiens
gaggtgcagctggtggagtctgggggaggcctggtcaagcctggggggtccctgagactctcctgttcagcctctggattcaccttcaatatctatgccatgaactgggtccgccaggttccaggaaaggggctggattgggtctcatccattagtagtaggggtgattacatatactacgcagagtcagtggagggccgattcaccatctccagagacaacgccaagaactcactgtatctggaaatgaacagcctgagagccgaggacacggctgtgtattactgtgcgagagctgggctgggtacagtggatttaaggtgggggggggccttcgaccactggggcaagggaatcctggtcaccgtctcctcag

SEQ ID NO: 1188 - DNA, 322 bp, Homo sapiens
gacatccagatgacccagtctccatcctccctgtctgcatctgttggagacagagtcaccatctcttgccaggcgagtcaggatattaccaactttttaaattggtaccagcagaaatctggggaagcccctaagctcctgatctacgatgcatccgatttggaaacaggggtcccatcaaggttcagtggaagtggatctgggacagattttactttcaccatcagcaggctgcagcctgaagacactgcaacatattactgtcaacagtatgacgatctcccgtatacttttggccaggggaccaaggtggagatcaaac

SEQ ID NO: 1189 - DNA, 364 bp, Homo sapiens; identical to SEQ ID NO: 1097

SEQ ID NO: 1190 - DNA, 375 bp, Homo sapiens; identical to SEQ ID NO: 1099

SEQ ID NO: 1191 - DNA, 366 bp, Homo sapiens; identical to SEQ ID NO: 1101

SEQ ID NO: 1192 - DNA, 357 bp, Homo sapiens; identical to SEQ ID NO: 1103

SEQ ID NO: 1193 - DNA, 352 bp, Homo sapiens; identical to SEQ ID NO: 1105

SEQ ID NO: 1194 - DNA, 379 bp, Homo sapiens; identical to SEQ ID NO: 1107

SEQ ID NO: 1195 - DNA, 384 bp, Homo sapiens; identical to SEQ ID NO: 1109

SEQ ID NO: 1196 - DNA, 343 bp, Homo sapiens; identical to SEQ ID NO: 1111

SEQ ID NO: 1197 - DNA, 361 bp, Homo sapiens; identical to SEQ ID NO: 1113

SEQ ID NO: 1198 - DNA, 373 bp, Homo sapiens; identical to SEQ ID NO: 1115

SEQ ID NO: 1199 - DNA, 363 bp, Homo sapiens; identical to SEQ ID NO: 1117

SEQ ID NO: 1200 - DNA, 364 bp, Homo sapiens; identical to SEQ ID NO: 1119

SEQ ID NO: 1201 - DNA, 364 bp, Homo sapiens; identical to SEQ ID NO: 1121

SEQ ID NO: 1202 - DNA, 370 bp, Homo sapiens; identical to SEQ ID NO: 1123

SEQ ID NO: 1203 - DNA, 372 bp, Homo sapiens; identical to SEQ ID NO: 1125

SEQ ID NO: 1204 - DNA, 367 bp, Homo sapiens; identical to SEQ ID NO: 1129

SEQ ID NO: 1205 - DNA, 390 bp, Homo sapiens; identical to SEQ ID NO: 1131

SEQ ID NO: 1206 - DNA, 378 bp, Homo sapiens; identical to SEQ ID NO: 1133

SEQ ID NO: 1207 - DNA, 370 bp, Homo sapiens; identical to SEQ ID NO: 1135

SEQ ID NO: 1208 - DNA, 381 bp, Homo sapiens; identical to SEQ ID NO: 1137

SEQ ID NO: 1209 - DNA, 358 bp, Homo sapiens; identical to SEQ ID NO: 1139

SEQ ID NO: 1210 - DNA, 364 bp, Homo sapiens; identical to SEQ ID NO: 1141

SEQ ID NO: 1211 - DNA, 370 bp, Homo sapiens; identical to SEQ ID NO: 1143

SEQ ID NO: 1212 - DNA, 367 bp, Homo sapiens; identical to SEQ ID NO: 1145

SEQ ID NO: 1213 - DNA, 370 bp, Homo sapiens; identical to SEQ ID NO: 1147

SEQ ID NO: 1214 - DNA, 393 bp, Homo sapiens; identical to SEQ ID NO: 1149

SEQ ID NO: 1215 - DNA, 361 bp, Homo sapiens; identical to SEQ ID NO: 1151

SEQ ID NO: 1216 - DNA, 364 bp, Homo sapiens; identical to SEQ ID NO: 1153

SEQ ID NO: 1217 - DNA, 385 bp, Homo sapiens; identical to SEQ ID NO: 1155

SEQ ID NO: 1218 - DNA, 364 bp, Homo sapiens; identical to SEQ ID NO: 1157

SEQ ID NO: 1219 - DNA, 328 bp, Homo sapiens; identical to SEQ ID NO: 1159

SEQ ID NO: 1220 - DNA, 358 bp, Homo sapiens; identical to SEQ ID NO: 1161

SEQ ID NO: 1221 - DNA, 364 bp, Homo sapiens; identical to SEQ ID NO: 1163

SEQ ID NO: 1222 - DNA, 367 bp, Homo sapiens; identical to SEQ ID NO: 1165

SEQ ID NO: 1223 - DNA, 361 bp, Homo sapiens; identical to SEQ ID NO: 1167

SEQ ID NO: 1224 - DNA, 390 bp, Homo sapiens; identical to SEQ ID NO: 1169

SEQ ID NO: 1225 - DNA, 376 bp, Homo sapiens; identical to SEQ ID NO: 1171

SEQ ID NO: 1226 - DNA, 391 bp, Homo sapiens; identical to SEQ ID NO: 1173

SEQ ID NO: 1227 - DNA, 361 bp, Homo sapiens; identical to SEQ ID NO: 1175

SEQ ID NO: 1228 - DNA, 381 bp, Homo sapiens; identical to SEQ ID NO: 1177

SEQ ID NO: 1229 - DNA, 361 bp, Homo sapiens; identical to SEQ ID NO: 1179

SEQ ID NO: 1230 - DNA, 375 bp, Homo sapiens; identical to SEQ ID NO: 1180

SEQ ID NO: 1231 - DNA, 361 bp, Homo sapiens; identical to SEQ ID NO: 1179

SEQ ID NO: 1232 - DNA, 355 bp, Homo sapiens; identical to SEQ ID NO: 1184

SEQ ID NO: 1233 - DNA, 376 bp, Homo sapiens; identical to SEQ ID NO: 1187

SEQ ID NO: 1234 - DNA, 325 bp, Homo sapiens; identical to SEQ ID NO: 1098

SEQ ID NO: 1235 - DNA, 322 bp, Homo sapiens; identical to SEQ ID NO: 1100

SEQ ID NO: 1236 - DNA, 325 bp, Homo sapiens; identical to SEQ ID NO: 1102

SEQ ID NO: 1237 - DNA, 325 bp, Homo sapiens; identical to SEQ ID NO: 1104

SEQ ID NO: 1238 - DNA, 333 bp, Homo sapiens; identical to SEQ ID NO: 1106

SEQ ID NO: 1239 - DNA, 322 bp, Homo sapiens; identical to SEQ ID NO: 1108

SEQ ID NO: 1240 - DNA, 322 bp, Homo sapiens; identical to SEQ ID NO: 1110

SEQ ID NO: 1241 - DNA, 322 bp, Homo sapiens; identical to SEQ ID NO: 1112

SEQ ID NO: 1242 - DNA, 325 bp, Homo sapiens; identical to SEQ ID NO: 1114

SEQ ID NO: 1243 - DNA, 340 bp, Homo sapiens; identical to SEQ ID NO: 1116

SEQ ID NO: 1244 - DNA, 313 bp, Homo sapiens; identical to SEQ ID NO: 1118

SEQ ID NO: 1245 - DNA, 319 bp, Homo sapiens; identical to SEQ ID NO: 1120

SEQ ID NO: 1246 - DNA, 319 bp, Homo sapiens; identical to SEQ ID NO: 1122

SEQ ID NO: 1247 - DNA, 337 bp, Homo sapiens; identical to SEQ ID NO: 1124

SEQ ID NO: 1248 - DNA, 319 bp, Homo sapiens; identical to SEQ ID NO: 1126

SEQ ID NO: 1249 - DNA, 337 bp, Homo sapiens; identical to SEQ ID NO: 1128

SEQ ID NO: 1250 - DNA, 343 bp, Homo sapiens; identical to SEQ ID NO: 1130

SEQ ID NO: 1251 - DNA, 319 bp, Homo sapiens; identical to SEQ ID NO: 1132

SEQ ID NO: 1252 - DNA, 322 bp, Homo sapiens; identical to SEQ ID NO: 1134

SEQ ID NO: 1253 - DNA, 322 bp, Homo sapiens; identical to SEQ ID NO: 1136

SEQ ID NO: 1254 - DNA, 328 bp, Homo sapiens; identical to SEQ ID NO: 1138

SEQ ID NO: 1255 - DNA, 319 bp, Homo sapiens; identical to SEQ ID NO: 1140

SEQ ID NO: 1256 - DNA, 340 bp, Homo sapiens; identical to SEQ ID NO: 1142

SEQ ID NO: 1257 - DNA, 325 bp, Homo sapiens; identical to SEQ ID NO: 1144

SEQ ID NO: 1258 - DNA, 322 bp, Homo sapiens; identical to SEQ ID NO: 1146

SEQ ID NO: 1259 - DNA, 322 bp, Homo sapiens; identical to SEQ ID NO: 1148

SEQ ID NO: 1260 - DNA, 322 bp, Homo sapiens; identical to SEQ ID NO: 1150

SEQ ID NO: 1261 - DNA, 340 bp, Homo sapiens; identical to SEQ ID NO: 1152

SEQ ID NO: 1262 - DNA, 322 bp, Homo sapiens; identical to SEQ ID NO: 1154

SEQ ID NO: 1263 - DNA, 322 bp, Homo sapiens; identical to SEQ ID NO: 1156

SEQ ID NO: 1264 - DNA, 325 bp, Homo sapiens; identical to SEQ ID NO: 1158

SEQ ID NO: 1265 - DNA, 337 bp, Homo sapiens; identical to SEQ ID NO: 1160

SEQ ID NO: 1266 - DNA, 331 bp, Homo sapiens; identical to SEQ ID NO: 1162

SEQ ID NO: 1267 - DNA, 322 bp, Homo sapiens; identical to SEQ ID NO: 1164

SEQ ID NO: 1268 - DNA, 337 bp, Homo sapiens; identical to SEQ ID NO: 1166

SEQ ID NO: 1269 - DNA, 325 bp, Homo sapiens; identical to SEQ ID NO: 1168

SEQ ID NO: 1270 - DNA, 322 bp, Homo sapiens; identical to SEQ ID NO: 1170

SEQ ID NO: 1271 - DNA, 340 bp, Homo sapiens; identical to SEQ ID NO: 1172

SEQ ID NO: 1272 - DNA, 319 bp, Homo sapiens; identical to SEQ ID NO: 1174

SEQ ID NO: 1273 - DNA, 325 bp, Homo sapiens; identical to SEQ ID NO: 1176

SEQ ID NO: 1274 - DNA, 322 bp, Homo sapiens; identical to SEQ ID NO: 1178

SEQ ID NO: 1275 - DNA, 322 bp, Homo sapiens; identical to SEQ ID NO: 1181

SEQ ID NO: 1276 - DNA, 322 bp, Homo sapiens; identical to SEQ ID NO: 1183

SEQ ID NO: 1277 - DNA, 319 bp, Homo sapiens; identical to SEQ ID NO: 1185

SEQ ID NO: 1278 - DNA, 325 bp, Homo sapiens
gaaatagtgatgacgcagtctccagccaccctgtctgtgtctccaggggaaagagccaccctctcctgcagggccagtcagagtgttagcagcaacttagcctggtaccagaacaaacctggccaggctcccagactcctcatctatggtgcatccaccagggccactggtgtcccagccaggttcagtggcagtgggtctgggacagaattcactctcagcatcagcagcctgcagtctgaagattttgcagtttattactgtcaacactataatgactggccttcgtgcagttttggccaggggaccaagctggagatcacac

SEQ ID NO: 1279 - DNA, 322 bp, Homo sapiens; identical to SEQ ID NO: 1188

SEQ ID NO: 1280 - DNA, 296 bp, Homo sapiens
gaggtgcagctggtggagtctgggggaggcctggtcaagcctggggggtccctgagactctcctgtacagcctctggattcaacttcaacaaccatggcatgaactggctccgccaggctccagggaaggggctggagtgggtcgcttccattagcagtggtagtagatcccacttctacgcagactcactggagggccgattcaccgtctccagagataacgccaagaattccctttttctacaaatgaacagcctgagagccgaggacacggctgtctattactgtgcgagaga

SEQ ID NO: 1281 - DNA, 287 bp, Homo sapiens
gaaatagtgatgacgcagtctccagccaccctgtctgtgtctccaggggaaagagccaccctctcctgcagggccagtcagagtgttagtagctacttagcctggtaccagcagaaacctggccaggctcccaggctcctcatctatcatgcatccaccagggccactggtatcccagccaggttcagtggcagtgggtctgggacagagttcactctcaccatcagcggcctgcagtctgaagattttgcagtttattactgtcagcagtatagtcagtggcctcc

SEQ ID NO: 1282 - DNA, 296 bp, Homo sapiens
gaggtgcagctggtggagtcggggggaggcctggtcaagcctgaggggtccctgagactctcatgtgaagcctctggattcatcatcgatacctatagcatgaactgggtccgccaggctccagggaaggggctggaatgggtctcaaccattagtagtactagtaattacatatattacgcagactcagtgaagggccgattcaccatctccagagacaacgccaagaactcagtgtttctgcaaatgaacagcctgagagtcgaggacacggctatatattattgtgtgagaga

SEQ ID NO: 1283 - DNA, 277 bp, Homo sapiens
gacatccagttgacccagtctccatccttcctgtctgcatttgttggagacagagtcaccatcacttgccgggccagtcagggcattagcaattatttcgcctggtatcagcaaaaaccagggacagcccctaagctcctgatccacactgcatccactttgcaaagtggggtcccatcaaggttcagcggcagtggatctgggacagtgttcactctcacaatcagcagcctgcagcctgaagattttgcaacttattactgtcaacagcttaata

SEQ ID NO: 1284 - DNA, 295 bp, Homo sapiens
caggtgcagctggtggagtctgggggaggcgtggtccagcctgggaggtccctgagactctcctgtgcagcctctggattcaccttcagtaattttggcatgtactgggtccgccaggctccaggcaagggactggactgggtggcagttatatcatatgatggaagtaatacatactatgcagactccgtgaagggccgattcaccatctccagagacaattccaagaacacgctgagtctgcaattgaacagcctgaaaccagtggacacggctgtgtattactgtgcgaaag

SEQ ID NO: 1285 - DNA, 284 bp, Homo sapiens
gacatccagatgacccagtctccttccaccctgtctgcatctgtaggagacagagtcaccatcacttgccgggccagtcagaatattaatacttggttggcctggtatcagcagaaaccaggggaagcccctaatctcttgatctttgatgcctccattttggaaagtgggggcccatcaaggttcagcggcagtgggtctgggacagaattcactctcaccatcagcagcctgcagcctgatgattttgcaacttattactgccaacagtatcatagtcattc

SEQ ID NO: 1286 - DNA, 295 bp, Homo sapiens
aggtgcagctggtggagtcggggggaggcttggtcgagcctggggggtccctgagactctcctgtgcagcctctggattcaccttcagtgactaccaaatgagctggatccgccaggctccagggaaggggctggagtggctttcagacattactagtactggtaatgccaaatatcacgcagactctgtgaagggccgcttcaccgtctccagggacaacgccaagaggtcactgtatctacagatgaacagcctgagagccgaagacacggccgtctatttttgtgtgagaga

SEQ ID NO: 1287 - DNA, 287 bp, Homo sapiens
gaaattgtgttgacgcagtctccaggcaccctgtctttgtctccaggggaaagagccaccctctcctgcagggccagtcagagtgttaccggcggctttttagcctggtaccagcagaagcctggccaggctcccaggctcctcatatatggtccatccagcagggccactggcatcccagacaggttcagtggcagtgggtctgggacagacttcactctcaccatcagcagactggagcctgaagattttgcagtgtattactgtcagcagtatgggagctcacc

SEQ ID NO: 1288 - DNA, 296 bp, Homo sapiens
gaggtgcagctggtggagtctgggggaggctgggtccagccgggggggtccctgagactctcctgtgaagcctctgggttcacctttagtttgttttggatgggctgggtccgccaggctccagggaaggggctggagtgggtggccaccatgaagcaagatggaagtgaatattactatgtggactctgtgaagggccgattcaccatctccagagacaaccccaagaactcactgtatctgcagatgaacagcctgagagccgaggacacggctgtctactattgtgcgagaga

SEQ ID NO: 1289 - DNA, 297 bp, Homo sapiens
ttgtgatgactcagtctccactctccctgcccgtcacccttggacagccggcctccatctcctgcaggtctagtcaaggcctcgtgtccagtgatggaagcacctacttgagctggtatcagcagaggccaggccaatctccgaggcgccttttttataaggtttctgcgcgggactctggggtcccagacagattcagcgccagtgggtcaggcactgatttcacactgaaaatcagcagggtggaggctgaggatgttggggtttattactgcttgcaaggaacacactggcctc

SEQ ID NO: 1290 - DNA, 294 bp, Homo sapiens
caggtgcagctggtggagtctgggggaggcttggtcaagcctggagggtccctgagactctcctgtgcagcctctggtttcaccttcagtggttactacatgagctgggtccgccaggctccagggaaggggctggagtgggtttcatacattagtcatcgtggtaatatgatacactaccaggactctatgaagggccgattcatcatctccagggacaacgccaacaactcactttatctgcaaatgaacagcctgagagccgaggacacggccgtgtattactgtgcgaga

SEQ ID NO: 1291 - DNA, 277 bp, Homo sapiens
gacatccagttgacccagtctccatccttcctgtctgcatctgtaggagacagagtcaccatcacttgccgggccaatcagggcattagcagttctttagcctggtatcaacaaagaccagggaaagcccctaagctcctgatctatgctgcatccactttgcagagtggggtcccatcaaggttcagcggcagtggatctgggacagaattcactctcacaatcagcagcctgcagcctgaagattttgcatcttattactgtcaacaacttaata

SEQ ID NO: 1292 - DNA, 293 bp, Homo sapiens
gaggtgcagctgttggagtctgggggaggcttggtacagccgggggggtccctgagactctcctgcgcagcctctggactcaattttatcagctatgccatgagttgggtccgccaggctccagggaggggactggagtgggtctcagttgtgagcggtactggtggaaccacattctacggagactccgtgcagggccggttcaccatctccagagacaactccaagaatatgttgtatctgcagatggacagcctgcgagccgaagacacggccaaatatttctgtgcgaa

SEQ ID NO: 1293 - DNA, 284 bp, Homo sapiens
gaaattgtgttgacacagtctccagccaccctgtctttgtctccaggggaaagagccaccctctcctgcagggccagtcaaagtgttagattttacttagcctggtaccagcagaaacctggccaggctcccaggctcctcatctatgatgcatccaccagggccactggcatcccggccaggttcagtggcagtgggtctgggacagacttctctctcaccatcagcagcctagagactgaagattttgcagtttattactgtcagcagcggatcaactggcc

SEQ ID NO: 1294 - DNA, 296 bp, Homo sapiens
gaggtgcagctgttggagtctgggggagacttggtacaacctggggggtccctgagactctcctgtgttgtctctggatacacctttgactactctgccatgaattgggtccgccaggctccagggaaggggctggagtgggtctcaacaatttttggcgctgatgctcacacatattacgcagacgccgtgaagggccgattcaccatctccagagacagatccaagaacacactatatctgcaaatgagcagcctgcgagccgaagacacggccgtatattactgtgtaaaaga

SEQ ID NO: 1295 - DNA, 286 bp, Homo sapiens
gaaattgtgttgacacagtctccggccaccctgtctttgtctccaggggaaagagccaccctctcctgcagggccagtcagagtgttagccactacttagcctggttccaacaaaaacctggccagcctcccaggctcctcatttatgatgtttccaccagggccactggcatcccggccaggttcagtggcagtgggtctgggacagacttcactctcaccatcagcagcctagagcctgaagattttgcagtttattactgtcagcaacgtaacaactggcctc

SEQ ID NO: 1296 - DNA, 289 bp, Homo sapiens
caggtgcagctgcaggagtcgggcccaggactggtgaagccttcggggaccctgtccctcacctgcgctgtctctggtgtctccatcagcatgattaactggtggacttgggtccgccagcccccagggaaggggctggagtggattggggaaatctatcataatgggagcaccacctacaacccgtccctcaagactcgagtcaccatagcaatagacaagtccaagaaccagttctccctggagctgaactctgtgaccgccgcggacacggccatatattattgtg

SEQ ID NO: 1297 - DNA, 288 bp, Homo sapiens
gaaattgtgttgacgcagtctccaggcaccctgtctttgtctccaggggaaagagccaccctctcctgcagggccagtcagagtattagcaacaactacttagcctggtaccagcagaaacctggccaggctcccaggctcctcatctatggtgcgttcagcagggccactggcatcccagacaggttcagtggcagtgggtctgggacagacttcactctcaccatcagcagactggagcctgaagattttgcagtgtatcactgtcagcagtatggtagttcacct

SEQ ID NO: 1298 - DNA, 296 bp, Homo sapiens
gaggtgcagctggtgcagtctggagtagaggtgaagaagcccggggagtctctgaagatctcctgtaagggctctggatacagctttaccaactactggatcggctgggtgcgccaggtgcccgggaaaggcctggagtggatggggtccatctattctggtggctctactaccatttacagcccgtccttccaaggtcaggtcaccatctcagccgacaagtccaactccaccgcctaccttcaatggcgcagcctgaaggcctcggacaccgccatgtattactgtgcgagaca

SEQ ID NO: 1299 - DNA, 302 bp, Homo sapiens
gacatcgtgatgacccagtctccagactccctggctgtgtctctgggcgagagggccaccatcaactgcaggtccagccagaatgttttacacagctccaagaataagaattacttgggttggtaccagcacaaaccaggacagcctcctaagttactcatttactgggcatctacccgggagtccggggtccctgatcgattcagtggcagcgggtctgggacaaatttcactctcaccatcagcagcctgcaggctgaagatgtggcactttattactgtcagcaatattatagtagtcc

SEQ ID NO: 1300 - DNA, 296 bp, Homo sapiens
caggtgcagctgcaggagtcgggcccaggactggtgaagccttcggggaccctgtccctcacctgcgctgtctctggtgcctccatcagcagtactaactggtggagttgggtccgccagcccccagggaaggggctggagtggattggggaaatctatcataatgggagcaccaactacaatccgtccctcaagagtcgagtcaccatatcagtagacaagtccaagaaccagttctccctgaggctgagctctgtgaccgccgcggacacggccgtgtattactgtgcgagaga

SEQ ID NO: 1301 - DNA, 279 bp, Homo sapiens
gaaattgtgttgacacagtctccagccaccctgtctttgtctccaggggaaagagccaccctctcctgcagggccagtcagagtgttagcagctacttagcctggtaccaacagaaacctggccaggctcccaggctcctcatctatgatgcatccaacagggccactgacatcccagccaggttcagtggcagtgggtctgggacagacttcactctcaccatcagcagcctagagcctgaagattttgcagtttattactgtcagcagcgtagaaac

SEQ ID NO: 1302 - DNA, 292 bp, Homo sapiens
caggtgcagctggtgcagtctgggtctgagttgaagaagcctggggcctcagtgaaggtttcctgcaaggcttctggatacaccttcactacctattctatgaattgggtgcgacaggcccctggacaaggacttgagtggatgggatggatcaacacctacactgggaacccaacgtatgcccaggccttcacaggacggtttgtcttctccttggacacctctgtcagtacggcgtttctgcagatcaccagcctcaaggctgaggacactgccgtatattactgtgcga

SEQ ID NO: 1303 - DNA, 285 bp, Homo sapiens
gacatccagatgacccagtctccttccaccctgtctgcatctgtaggagacagagtctccatcacttgccgggccagtcagactattagtacttggttggcctggtatcagcagaaaccagggaaagcccctaagctcctgatctatgatgcctccactttggaaagtggggtcccatcaaggttcagcggcagtggatctgggacagaattcactctcaccatcagcagcctgcagcctgatgattttgcaacttattactgccaacagtataataattattct

SEQ ID NO: 1304 - DNA, 292 bp, Homo sapiens
caggtgcagctggtgcagtctgggtctgagttgaagaagcctggggcctcagtgaaggtttcctgcaaggcttcaggatacaccttcactagctatgcaatgaattgggtgcgacaggcccctggacaagggcttgagtggatgggatggatcaacacctacactggcaacccaacgtatgcccaggccttcacaggacggtttgtcttctcctcggacacctctgccagcacggcgtatctgcagatcaacagcctaaaggctgaggacactgccgtatattactgtgcga

SEQ ID NO: 1305 - DNA, 285 bp, Homo sapiens
gacatccagatgacccagtctccttccaccctgtctgcatctgtaggagacagagtcaccatcacttgccgggccagtcagactattattagctggttggcctggtatcagcagaaaccagggaaagcccctaagctcctgatctatgatgcctccactttggaaagtggggtcccatcaaggttcagcggcagtggatctgggacagaattcactctcaccatcagcagcctgcagcctgatgattttgcaacttattactgccaacagtataatagttattct

SEQ ID NO: 1306 - DNA, 296 bp, Homo sapiens
caggtgcagctggtgcagtctggaagtgaggtgaagaggccaggggcctcagtgcaggtctcctgcaagacttctggttacacttttagcgattatggtatgagttgggtgcgacaggcccctggacaaggacttgagtggatgggatggattaatgtgaacgttggcaacacaaactatgcacagaaattccagggcagagtctccgtgaccacagacacatccgcgggcacagcctacttggagttgaggagtctgacaagtgacgacacggcagtatattactgtgcgagaga

SEQ ID NO: 1307 - DNA, 300 bp, Homo sapiens
gatgttgtgatgactcagtctccactcgccctgcccgtcacccttggacagtcggcctccatctcctgcaggtccagtcaaagcctcgtagacagagatggaaacatctacttgatttggtttcaccagaggccaggccaatctccaaggcgcctaatttatgaggtttctaagcgggactctggggtcccagacagaatcagcggcagtgggtcacacactgatttcacactgagaatcagcagggtggaggctgaggatgttggggtttattactgcatgcaggctacacactggcct

SEQ ID NO: 1308 - DNA, 293 bp, Homo sapiens
caggtgcagctacagcagtggggcgcaggactgttgaagccttcggagaccctgtccctcacctgcgctgtctatggggggtccttcggtggttactactggaattggatccgtcagcccccagggaaggggctggagtggattggggaaatcaatcatagtggaagcaccaactacaacccgtccctcaagagtcgagtcaccctatcagtagacacgtccaagaaccaggtctccctgaacgtgagctctgtgaccgccgcggacacggctgtgtattactgtgcgagagg

SEQ ID NO: 1309 - DNA, 283 bp, Homo sapiens
gaaattgtgttgacacagtctccagccaccctgtctttgtctccaggggaaagagccaccctctcctgcagggccagtcagagtgttagcagctacttagcctggtatcaacagaaacctggccaggctcccaggctcctcatctatgatgcatccaagagggccactggcatcccagccaggttcagtggcagtgggtctgggacagacttcactctcaccatcagcagcctagagcctgaggattttgcagtttattactgtcagcagcgtagcaactggc

SEQ ID NO: 1310 - DNA, 301 bp, Homo sapiens
gatattgtgatgactcagtctccactctccctgcccgtcacccctggagagccggcctccatctcctgcaggtctagtcagagcctcctgcatagtagtggatacaactatttagattggtacctgcagaagccagggcagtctccacaggtcctgatctatttgggttctactagggcctccggggtccctgacaggttcagtggcagtggatcaggcacagattttacactgaaaatcagcagagtggaggctgaggatgttggggtttattactgcatgcaagctctacaaactcctc

SEQ ID NO: 1311 - DNA, 299 bp, Homo sapiens
caggtgcagctgcaggagtcgggcccaggactggtgaagccttcacagaccctgtccctcacctgcactgtctctggtgcctccatcaacagtggtggttactactggagctggatccgccagcacccagggaagggcctggagtggattgggtacatctatttcactgggagaaccaactacaacccgtccctcaagagtcgagttaccatatcaatagccacctctaagacccagttctccctgaagctgagctctgtgactgccgcggacacggccgtgtattactgtgcgagaga

SEQ ID NO: 1312 - DNA, 302 bp, Homo sapiens
gacatcgtgatgacccagtctccagactccctggctgtgcctctgggcgagagggccaccatcaactgcaagtccagccagagtgtttcatacagctccaccaataagaactgcttagcttggtaccagcagaaatcaggacagcctcctaaactgctcatttactgggcatctacccgggaatccggggtccctgaccgattcagtggcagcgggtctgggacagatttcactctcaccatcagcagcctgcaggctgaagatgtggcaatttattactgtcagcaatattgtggtactcc

SEQ ID NO: 1313 - DNA, 297 bp, Homo sapiens
caggtgcagctgcaggagtcgggcccaggactggtgaagccttcggagaccctgtccctcacctgctctgtctctggtggctccgtcagcagtggtatttaccactggacctggattcggcagcccccagggaagggactggagtggattggctatatctattacagtgggagcacgtattacaacccctccctcaagagtcgagtcaccatttcactcgacacgtccaagaaccacttctccctgaggctgagctctgtgaccgctgcggacacggccgtatattactgtgcgaga

SEQ ID NO: 1314 - DNA, 284 bp, Homo sapiens
gaaatagtgatgacgcagtctccagccaccctgtctgtgtctccaggggaaagagccaccctctcctgcagggccagtaagagtattagcagcaacttagcctggtaccagcaggaacctggccaggctcccaggctcctcatctatggtgcatccaccagggccactggtatcccagccaggttcagtggcagtgggtctgggacagagttcactctcaccatcagcagcctgcagtctgaagattttgcagtttattactgtcagcagtataataactggcc

SEQ ID NO: 1315 - DNA, 295 bp, Homo sapiens
caggtgcagctggtgcagtctgggactgaggtgaagaagcctgagtcctcggtgaaggtctcctgcgaggcttctggaggccccttcggcagctatgctgtcagctgggtgcgacaggcccctggacaacgacttgagtggattggagggatcatccctatctttgggacaccatactacgcgcagaaattccagggcagaatcacgattaccgcggacgaatccacgagcacagcctacatggagttgagcagcttgagatctgacgacacggccgtgtattactgtgggagag

SEQ ID NO: 1316 - DNA, 287 bp, Homo sapiens
gacatccagatgacccagtctccatcctccctgtctgcatctgtgggagacagagtcaccttcacttgccaggcgagtcaggacattagcaactctttaaattggtatcagcagaaaccagggaaagccccaaacatcctaatttacgatgcatccaatttggaaacaggggtcccatcaaggttcagtggaagtggatctgggacagattttactttcaccatcaccagcctgcagcctgaagatattgcaacatattactgtcaacactatgataatgtccctcc

SEQ ID NO: 1317 - DNA, 292 bp, Homo sapiens
caggtgcagctggtgcagtctggggctgagctgaagaagcctgggtcctcggtgaaggtctcctgcaagacttctggaggcacctccaacaactatcctatcagctgggtgcgacaggcccctggacaaggacttgagtggatgggagggtccatccctatctttaatacaccaaagtatggaaagaagttccagggcagagtcacgatcacctcggacacatccacgagcacagcctacatggagctgagcagcctgcgatctgacgacacggccatttattactgtgcga

SEQ ID NO: 1318 - DNA, 284 bp, Homo sapiens
gacatccagatgacccagtctccttccaccctgtctgcatctgtaggagacagagtcaccatcgcttgccgggccagtcagagtattagtgactggttggcctggtatcagcagaaaccaggaaaagcccctaaactcctgatccataaggcgtctagtttagaaagtggggtcccatcaaggttcagcggcggtggatctgggacagaattcactctcaccatcagcagcctgcaggcagatgattctgcaacttattactgccaacactataatacttattc

SEQ ID NO: 1319 - DNA, 298 bp, Homo sapiens
cggctgcagctgcaggagtcgggcccaggactggtgaagccttcggagaccctgtccctcacctgcactgcctctggtggctccgtcaacagcggtggttactactggggctggatccgccagcccccagggaaggggccggagtggattgggactatctataacagtgggagtgtcgactacaatccgtccctcaagagtcgagtcgccatatcaatagacacgttcgagaatcagttctccctgaagctgagttctgtgaccgccgcggacacggccgtctattactgtgcgagag

SEQ ID NO: 1320 - DNA, 285 bp, Homo sapiens
gaaatagtgatgacgcagtctccagccaccgtgtctgtgtctccaggggaaagagccaccctctcctgcagggccagtcagagtgttaccaacaacgtagcctggtaccagcagaaacctggccaggctcccaggctcctcatctatggtgcgtccaccagggccactggtatcccagccaggttcagtggcagtgggtctgggacagacttcattctcaccatcagcagcctgcagtctgaagattttgcactttattactgtcagcactacaataggtggcct

SEQ ID NO: 1321 - DNA, 292 bp, Homo sapiens
gaagtgcagctggtggagtctgggggaggcttggtacagcctggcaggtccctgcgactctcctgcgcagcctctggattcacctttgatgattatgccatgacgtgggtccggcaggctccagggaagggcctggagtgggtctcaggtattagctgggatagtggtgctataggctatgcggactctgtgaagggccgattcaccatctccagagacaacgccaagaactccctatatttgcaaatgaacagtctgagaactgaggacacggccttgtatttctgtgcaa

SEQ ID NO: 1322 - DNA, 284 bp, Homo sapiens
gaaatagtgatgacgcagtctccagccaccctgtctgtgtctccaggggaaagagccaccctctcttgcagggccagtgagggtattagcagccacttagcctggtaccagcagagacctggccaggctcccaggctcctcatctatggtgcatccacgagggccactggtatcccagccaggttccgcggcagtgggtctgggacagacttcactctcaccatcagcagcgtgcagtctgaagattttgcagtttattactgtcagcagtataataactggcc

SEQ ID NO: 1323 - DNA, 294 bp, Homo sapiens
caggtgcagctgcaggagtcgggcccaggactggtgaagccttcggagaccctgtccctcacctgcgctgtctctggttattccatcagcagtggttactactggggctggatccggcagcccccagggaaggggctggagtggattgggagtatctattatagtgggagcacgtactacaacccgtccctcaagagtcgagtcaccatatcagtagacacgtccaagaaccagttctccctgaagttgagttctgtgaccgccgcagacacggccgtgtattactgtgcgaga

SEQ ID NO: 1324 - DNA, 299 bp, Homo sapiens
gatattgtgatgacccagactccactctcctcacctgtcacccttggacagccggcctccatctcctgcaggtctagtcaaagcctcgtacacagtgatggaaacacctacttgagttggcttcagcagaggccaggccagcctccaagactcctaatttataagatttctaaccggttctctggggtcccagacagattcagtggcagtggggcagggacagatttcacactgaaaatcagcagggtggaagctgaggatgtcggggtttattactgcatgcaagctacacaatttcc

SEQ ID NO: 1325 - DNA, 294 bp, Homo sapiens
caggtgcagctggtgcagtctggagctgaggtgaagaagcctggggcctcagtgaaggtctcctgtcaggcttctggttatacctttagcagctatggtatcagctgggtgcgacaggcccctggacaagggcttgagtggatgggatggatcagcgcttacagtggtaacacaaactatgcacaaaaggtccaagacagagtcaccatgaccacagaaacatccacgagcacagcctacatggagctgaggagcctgagatctgacgacacggccatgtattactgtgcgaga

SEQ ID NO: 1326 - DNA, 287 bp, Homo sapiens
gaaattgtgttgacgcagtctccaggcaccctgtctttgtctccaggggaaagagccaccctctcctgcagggccagtcagagtattagcagcagttacttagcctggtaccagcggaaacctggccaggctcccaggctcctcatctatggtgcatccagcagggccactggcatcccagacaggttcagtggcggtgggtctgggacagacttcactctcaccatcagcagactggagcctgaagattttggagtgtattactgccagcagtatggtacctcacc

SEQ ID NO: 1327 - DNA, 299 bp, Homo sapiens
caggtgcagctgcaggagtcgggcccaggactggtgaggccttcacagaccctgtccctcacctgcactgtctctggcgactccatcaatagtggtggttactactggaattggatccgccagcccccagggaagggccttgagtggattggatacatctatttcactgggaggaccaactacaacccgtccctcgggagtcgagtgacgatatcactagattcgtctaagacgcagttctccctgaaactgacctctatgacggccgcggacacggccgtgtattactgtgcgagaga

SEQ ID NO: 1328 - DNA, 284 bp, Homo sapiens
gacatccagatgacccagtctccatcctccctgtctgcatctgtaggagacagaatcaccatcacttgccgggcgagtcagggcattaggaactatgtagcctggtatcagcagaaaccaggtagagttcctaagctcctgatctatgctgcttccactttgcaatcgggggtcccatcccgcttcagtggcagtggatctgggacagagttcactctcaccatcagcagcctgcaggctgaagatgttgcaacttattactgtcaaaagtataacagtgtccc

SEQ ID NO: 1329 - DNA, 292 bp, Homo sapiens
caggtgcagctggtgcagtctggggctgaggtaaagaagcctgggtcctccgtgaaggtctcctgcaaggcctctgggatgacctcgaacagccttgccatcagctgggtgcgacaggcccctggacaaggacttgagtggatgggaggcatcatccctgtctttgaaaccccaaaatacgcacagaaattccagggcagagtcaccattaccgcggacaaatccacgaacacagcctacatggacctgatcagcctcaaatctgaagacacggccatgtattattgtgcga

SEQ ID NO: 1330 - DNA, 284 bp, Homo sapiens
gacatccagatgacccagtctccttccactctgtctgcgtctgtgggagacagagtcaccatcacttgccgggccagtcagactattactacgtggctggcctggtatcagcagaaaccagggcaagcccctaagctcctcatccataagacatctactttagaaactggggtcccgtcgaggttcagcggcagtggatctgggacacaattcactctcaccatcaccaacctgcagcctgatgattctgcaacttattactgccaacaatacagtacttattc

SEQ ID NO: 1331 - DNA, 299 bp, Homo sapiens
caggtgcagctgcaggagtcgggcccaggactggtgaagccttcacagaccctgtccctcacctgcactgtctctggtgcctccatcagcagtggtgattcctactggagttggatccgccagcccccagggaagggcctggagtggattgggtacatctctaacagtgggagcaccgactacaacccgtccctcaagagtcgagtaagcatatcagtagacacgtcgaagagccagttctccctgaagctgagctctgtggatgccgcagacacggccgtgtattactgtgccagaga

SEQ ID NO: 1332 - DNA, 285 bp, Homo sapiens
gacatccagatgacccagtctccatcctccctgtctgcatctgtaggagacagagtcactatcacttgccgggcaggtcagaacgttagagactatttaaattggtatcagcagaaaccagggaaagccccgaagctcctgatctacactgcatccagtttgcaaagtggagtcccatcaaggttcagtggcagtggatctgggacagacttcactctcaccatcagcagtctgcaacctgaagattttgcaacttactactgtcaacagacttacagtccccct

SEQ ID NO: 1333 - DNA, 296 bp, Homo sapiens
caggtgcagctggtgcagtctggggctgaggtgaagaagcctgggtcctcggtgaaggtctcctgtaaggcttctggaggcagcttcagcacctatgctatcaactgggtgcgacaggcccctggacaagggcttgagtggatgggaggcatcattcctgtcgttggtagagcagactacgcacagaagtttcggggcagagtcacgataacagcggacgaattcacaagcacagcctacatggagctgagcagcctgagatctgaggacacggccgtgtattactgtgcgagaga

SEQ ID NO: 1334 - DNA, 300 bp, Homo sapiens
gacatcgtgatgacccagtctccagactccctggctgtgtctctgggcgagagggccaccatcaactgcaagtccagccagagtgttttgttcagctccaacaataagcactacttggcttggttccagcaaaaaccaggacagccccctaaactgctcatttactgggcatctacccgggaatccggggtccctgaccgattcagtggcagcgggtctgggacagatttcactctcaccatcaccagcctgcagcctgaggatgtggcagtttattactgtcagcaatattatagtact

SEQ ID NO: 1335 - DNA, 293 bp, Homo sapiens
caggtgcagctgcaggagtcgggcccaggactggtgaagccttcggagaccctgtccctcacctgcactgtctctggtgattccatcaggaattactactggagctggatccggcaggccccagggaagggactggagtccattggatatatctattacagtggaagagccaagtacaacccctccctcgagagtcgagtcaccatgtcagtagacacgtccaagaaccagttctccctgaaattgacctctgtgaccgccgcggacacggccgtctattactgtgcgagaga

SEQ ID NO: 1336 - DNA, 286 bp, Homo sapiens
gacatccagatgacccagtctccatcctccctgtctgcatctgtcggagacagagtcaccatcacttgccgggcgagtcagaccattaaaaaatatttaaattggtatcagcaggaaccagggaaagcccctaaactcctgatctatactgcatccagtttgcaaagtgggatcccatcaaggttcagtggcagtggctctgggacagatttcactcttatcatcaccagtctgcaacctgaagatgttgcaacttactactgtcaacagagttacgatacccctc

SEQ ID NO: 1337 - DNA, 295 bp, Homo sapiens
caggtgcagctggtgcagtctggagctgaggtgaagaggcctggggcctcagtgaggatcgcctgcaaggcttctggtgacactttaacaagttttggttttagttgggtgcgacaggcccgtggacaaggacttgagtggatgggatggatcaacggttacaatagtaacccaaactatgcacagatcttccaggacagagtcaccttgaccatcgacacatacacgagcacagcctacatggagtttaggagcctggtgtctgacgacacgggcatatattattgtgcgagag

SEQ ID NO: 1338 - DNA, 284 bp, Homo sapiens
gacatccagatgacccagtctccatcgtccctgtctgcatctgtaggagacagagtcaccatcacttgccgggcgagtcggggcattgccgattatttagcctggtatcagcagaaaccagggaaagttcctcagctcctgatctatgctgcgtccactttgcagtcaggggtcccatctcggttcagtggcagtggatctgggacagttttcactctcaccatcagccgcctgcagcctgaagatgttgcaacttattactgtcaagtgtatatcagtgcccc

SEQ ID NO: 1339 - DNA, 293 bp, Homo sapiens
caggtgcagctggtgcagtctggggctgaggtgaagaagcctgggtcctcggtgaaggtctcctgcagggcctctggaggcattttcagaagtaatgctatcagctgggtgcgacaggcccctggacaagggcttgagtggatgggagaaatcatcgctgtctttggtacagcaaactacgcacagaagttccagggcagagtcactattaccgcggacgaatccacgagcacagcctacatggagctgagcagcctgagatctgaggacacggccgtgtattactgtgcgag

SEQ ID NO: 1340 - DNA, 289 bp, Homo sapiens
gaaattgtgttgacgcagtctccaggcaccctgtctttgtctccaggggaaagagccaccctctcctgcagggccagtcagagtgttagcagcaactatttagcctggtaccagcaaaaacctggccaggctcccaggctcctcatctatggtgcatccaacagggccactggcatccctgacaggttcagtggcagtgggtctgggacagacttcactctcgccatcagcagactggagcctgaagattttgcagtgtattactgtcagcagtatggtacctcacctc

SEQ ID NO: 1341 - DNA, 273 bp, Homo sapiens
caggtgcagctggtgcagtctgggactgaggtgaagaagcctgggtcgtcggtgaggatctcctgcgaggcctctggagccaccttcagcagtcttgggatcaattggttccgtctgggccctggacaagggcttgagtggatgggagcgcccatccctctctctgggacaccaacctacgcacagaagttccagggcagactcacaatcacatcgggcttcatggagctgagcagcctgacgtctgaagacacggccatgtatttctgtgcg

SEQ ID NO: 1342 - DNA, 302 bp, Homo sapiens
gatattgtgatgactcagtctccactctccctgcccgccacccctggagagtcggcctccatctcctgcaggtctagtcagatcctcctgcatggaaatggaaacaactatttggattggtacgtgcagaagcccggtcagtctccgcagctgttgatctatttgggttctagacgggcctccggggtccctgacaggttcagtggcagtggatcaggcacagattttgcactgaaaatcagcagagtggaggctgaggatgttggagtttattactgcatgcaatctctacaaactcctcc

SEQ ID NO: 1343 - DNA, 296 bp, Homo sapiens
caggtgcagctggtgcagtctggggctgaagtgaagaagcctgggtcctcggtgaaggtctcctgcaaggcttctggaggcaccttcggcagttatggtattaactgggtgcgacaggcccctggacaagggcttgagtggatgggaggcatcactcctatagatgggataccaaattacgcacagaagtttcagggcagcgtcacgattaccgcggacgaatccacgagaacagcctacatggaactcagcagcctgacatctgaggacacggccatgtattactgtgcgagaga

SEQ ID NO: 1344 - DNA, 287 bp, Homo sapiens
gaaattgtgttgacgcagtctccaggcaccctgtctttgtctccaggggacagagccaccctctcctgcagggccagtcagagggttagcaacaatttcttagcctggtatcagcagaaacctggcctggctcccagactcctcttctatggtgtatccaccagggccactggcatcccagacaggttcagtggcagtgggtctgggacagacttcactctcaccatcagcagactggagcctgaggattttgcagtctattactgtcagtactatgttagttcacc

SEQ ID NO: 1345 - DNA, 293 bp, Homo sapiens
caggtgcagctggtgcagtctggggctgaggtgaagaagcctgggtcctcggtgaaggtctcctgcaaggcctctggaggcaccttcagaaactttgctgtcagctgggtgcgacaggcccctggacaagggcctgagtggatgggagggatcatcgccatctttggtacagcaaagtacgcacagaagttccagggcagagtcacaatttcggcggacgagtccacgaggatagtccagatggagctgagcagcctgagatctgacgacacggccatttattactgtgcgag

SEQ ID NO: 1346 - DNA, 286 bp, Homo sapiens
gaaatagtgatgacgcagtctccagccaccctgtctgtgtctccaggggaaagagccaccctctcctgcagggccagtcagagtgttagcagtaacttagcctggtaccagcagacacctggccaggctcccaggctcctcatctatgctgcatcctccagggccactggtatcccagccaggttcagtggcagtgggtctgggacagagttcactctcagcatcagcagcctacagcctgaagattttgcagtttattactgtcagcagtataataactggcctc

SEQ ID NO: 1347 - DNA, 292 bp, Homo sapiens
gaggtgcagctgttggagtctgggggaggcttggtacagcctggggggtccctgagactctcctgtgcagcctctggattcacctttagcagctatgccatgagctgggtccgccaggctccagggaaggggctggagtgggtctcagctattagtggtagtggtggtagcacatactacgcagactccgtgaagggccggttcaccgtctccagagacaattccaagagcacactgtatctacaaatgaacagcctgagacccgaggacacggccatatattactgtgcga

SEQ ID NO: 1348 - DNA, 299 bp, Homo sapiens
gatattgtgatgactcagtctccactctccctgcccgtcacccctggagagccggcctccatctcctgcaggtctagtcagagcctcctacatactaatggatacagctatgtggattggtacctgcagaagccagggcagtctccacagctcctgatctatttggtttctaatcgggcctccggggtccctgacaggttcagtggcagtggatcaggcacagattttacactgaaaatcagcagagtggaggctgaggatgttggcgtttattactgcatgcaacctctacaaactcc

SEQ ID NO: 1349 - DNA, 294 bp, Homo sapiens
gaggtgcagctggtggagtctgggggaggcctggtcaagccggggggctccctgagactctcctgtgcagcctctggattctactttagtgactatggcatgaactgggtccgccagtctgcagggagggggctggagtggatctcatacattgccagtagtggtagtaacatatactacgcagactcagtgaagggccggttcaccatctccagagacgacgccaagaactcactatttctgcacatgaacagcctgagagccgaggacacggctgtgtattactgtgcgaga

SEQ ID NO: 1350 - DNA, 289 bp, Homo sapiens
gaaattgtgttgacgcagtctccaggcacactgtctttgtctccaggggaaagagccaccctctcctgcagggccagtcagactgttagcagcaccttcttagcctggtatcagcagaaacctggccaggctcccaggctcctcatctttggtgcatctaccagggccgctggcatcccagacaggttcagtggcagtgggtctgggacagacttcactctcaccatcagcagactggagcctgaagattttgcagtgtattactgtcagcagtatggcaggtcacctc

SEQ ID NO: 1351 - DNA, 295 bp, Homo sapiens
gaggtgcagctggtgcagtctggagcagaggtgaaaaagcccggggggtctctgaagatctcctgtaagacttctggatacagctttaacacctactggatcggctgggtgcgccaggtgcccgggaaaggcctggagtggatgggcatgatctatcctggtgactctgataccagatacggcccgtccttccaaggccaggtcaccatctcagccgacaagtccgtcacaaccgcctacttgcgctggagcagtgtgcaggcctcggacagcgccatatattactgtgcgagac

SEQ ID NO: 1352 - DNA, 287 bp, Homo sapiens
gaaattgtgttgacgcagtctccaggtaccctgtctttgtctccaggggaaagagccaccctctcctgcagggccagtcagactgttagcggcagcttcttagcctggtaccagcagaaacctggccaggctcccaggctcctcatttatggtgcatccagcaggcccactggcatcccagacagattcagtggcagtgggtctgggacacacttcactctcaccatcaccagactggagcctgaagattttgcagtatattactgtcagcagtatggtcgctctcc

SEQ ID NO: 1353 - DNA, 295 bp, Homo sapiens
gaggtgcagctgttggagtctgggggaggcttggtacagcctggggggtccctgagactctcctgtgaagcctccggattcacctttacgagctttggcatgaattgggtccgccaggctccagggaaggggctggagtgggtcgcagtcattagtggaagtgacggtagcacatactacgcggactccgtgaagggccgattcaccatctccagagacaattccaacaacacggtgtatctgcaaatgaacgggctgagagtcgaggacacggccgtatattactgtgcgaaag

SEQ ID NO: 1354 - DNA, 304 bp, Homo sapiens
gacatcgtgatgacccagtctccagactccctggctgtgtctctgggcgagacggccaccatcaactgcaggtccagccagagtgttttatatccttccaacagtaggaactacttagcttggtaccagcagaaaccaggacagcctcctaaactgctcatttactgggcatctacccgggattccggggtccctgaccgattcagtggcagcgggtctggggcagatttcactctcaccattaccagcctgcaggctgaagatgtggcagtctattactgtcagcaatatgttacttctcctc

SEQ ID NO: 1355 - DNA, 295 bp, Homo sapiens
caggtgcagctggtgcagtctggggctgaggtgaagatgcctgggtcctcggtgaaggtctcctgcagggcttctggaggcaccttcagcacctatactatcacctgggtgcgacaggcccctggacaagggcttgagtggatgggagtcatctaccctgtctttggttcggcaaactacgcacagaacttccagggcagactcatgattaccgcggacgaatccccgagcacagcctacatggagctgagcagcctcagatctgaggacacggccgtctattattgtgcgagag

SEQ ID NO: 1356 - DNA, 282 bp, Homo sapiens
gaaattgtgttgacacagtctccagccaccctgtctttgtctgcaggggaaagagccaccctctcctgcagggccagtcagagtgttagcagctacttagcctggtaccaacagaaacctggccaggctcccaggctcctcatctttgatgcatccaacagggcctctggcatcccagccaggttcagtggcagtgggtctgggacagacttcactctcaccatcagcagcctagagcctgaagattttgcagtttattactgtcagcagagtagcaactgg

SEQ ID NO: 1357 - DNA, 295 bp, Homo sapiens
gaagtgcagctggtggagtctgggggaggcttggtacagcccggcgggtccctgagactctcctgtgcagtctctggattcagatttgaagactatgccatgcactgggtccggcaagctccagggaagggcctggagtgggtctcaggtattagttggaatagtggtgctataggctatgcagactctgtggagggccgattcaccatctccagagacaacgccaagaactccctctatctgcaaatgaacaatctgagagttgaggacacggccttgtattactgtacaaaag

SEQ ID NO: 1358 - DNA, 284 bp, Homo sapiens
gaaatagtgatgacgcagtctccagccaccctgtctgtgtctccaggtgaaagagccaccctctcctgcagggccagtcagagtgctagcaacaacttagcctggtaccagcagaaacctggccagactcccaggctcctcatctatggtgtttccaccagggccactggtgtcccagccaggttcagtggcagtgggtctgggacagagttcactctcaccatcagcagcctgcagtctgaagattttgcagtttattactgtcaacagtataatggctggcc

SEQ ID NO: 1359 - DNA, 293 bp, Homo sapiens
gaggtgcagctggtggagtctgggggaggcttggtccagcctggggggtccctgagactctcctgttcagcctctggattcaccttcagtagctatgctatgcactgggtccgccaggctccagggaagggactggaatatgtttcagctattagtagtaatgggggtagcacatactacgcagactcagtgaagggcagattcaccatctccagagacaattccaagaacacgctgtatcttcaaatgagcagtctgagagctgaggacacggctgtgtattactgtgtgaa

SEQ ID NO: 1360 - DNA, 284 bp, Homo sapiens
gacatccagatgacccagtctccatcctccctgtctgcatctgtaggagacagagtcaccatcacttgccgggcaagtcagagcattagcatctctttaaaatggtatcagcagaaaccagggaaagcccctaagctcctgatctatgctgcatccagtttgcaaagtggggtcccatcaaggttcagtggcagtggatctgggacagatttcactctcaccatcagcagtctgcaacctgaagattttgcaacttactactgtcaacagagttacagtactcc

SEQ ID NO: 1361 - DNA, 296 bp, Homo sapiens
caggtgcagctggtggagtctgggggaggcgtggtccagcctgggaggtccctgagactctcctgtgcagcgtctggattcaccttcagtacctatggcatgcactgggtccgccaggctccaggcaaggggctggagtgggtggcagttatatggtatgatggaagtaataaatactatgcagactccgtgaagggccgattcaccatctccagagacaattccaagaacacgctgtatctgcaaatgaacagcctgagagccgaggacacggctgtgtattactgtgcgagaga

SEQ ID NO: 1362 - DNA, 294 bp, Homo sapiens
gaggtgcagctggtggagtctgggggaggcctggtcaagcctggggggtccctgagactctcctgtgcagcctctggattcaccttcagttcctatagcatgaactgggtccgccaggctccagggaaggggctggagtgggtctcatccattagtagtagtagtagttacatatactacgcagactcagtgaagggccgattcaccatctccagagacaacgccaagaactcactgtatctgcaaatgaacagcctgagagccgaggacacggctgtgtattactgtgcgaga

SEQ ID NO: 1363 - DNA, 284 bp, Homo sapiens
gaaatagtgatgacgcagtctccagccaccctgtctgtgtctccaggggaaagagccaccctctcctgcagggccagtcagagtgttagcagcaacttagcctggtaccagcagaaacctggccaggctcccaggctcctcatctatggtgcatccaccagggccactggtatcccagccaggttcagtggcagtgggtctgggacagagttcactctcaccatcagcagcctgcagtctgaagattttgcagtttattactgtcagcagtataataactggcc

SEQ ID NO: 1364 - DNA, 296 bp, Homo sapiens; identical to SEQ ID NO: 1361

SEQ ID NO: 1365 - DNA, 284 bp, Homo sapiens
gacatccagatgacccagtctccatcctccctgtctgcatctgtaggagacagagtcaccatcacttgccgggcaagtcagagcattagcatctctttaaattggtatcagcagaaaccagggaaagcccctaagctcctgatctatgctgcatccagtttgcaaagtggggtcccatcaaggttcagtggcagtggatctgggacagatttcactctcaccatcagcagtctgcaacctgaagattttgcaacttactactgtcaacagagttacagtactcc

SEQ ID NO: 1366 - DNA, 291 bp, Homo sapiens
caggtgcagctgcaggagtcgggcccaggactggtgaagccttcggacaccctgttcctcacctgcgctgtctctggttactccatcgacagtggtcactggtggggctggatccggcagcccccagggacgggactggagtacattggttacacctattatagtgggagcacctacgccaatccgtccctcaggagtcgaatcaccatgtcactagacacgtccaagaaccagttctccctgaaagtcagctctgtgaccgccgtggacacggccgtctattactgtgcg

SEQ ID NO: 1367 - DNA, 280 bp, Homo sapiens
gacatccagatgacccagtctccttccacgctgtctgcatctgtaggagacagagtcaccatcacttgccgggccagtcagagcattagtaactggttggcctggtatcagcagaaaccagggaaagcccctaagctcctgatctataaggcgtctactttacaaagtggggtcccatcaaggttcagcggcagtggatctgggacagaattcacgctcaccatcaacagcctgcagcctgatgattttgcaacttattactgccaacaatataatagtt

SEQ ID NO: 1368 - DNA, 285 bp, Homo sapiens
gaaatagtgatgacgcagtctccagccaccctgtctgtgtctccaggggaaagagccaccctctcctgcagggccagtcagagtgttagcagcaacttagcctggtaccagaacaaacctggccaggctcccagactcctcatctatggtgcatccaccagggccactggtgtcccagccaggttcagtggcagtgggtctgggacagaattcactctcagcatcagcagcctgcagtctgaagattttgcagtttattactgtcaacactataatgactggcct

SEQ ID NO: 1369 - DNA, 295 bp, Homo sapiens
gaggtgcagctggtggagtctgggggaggcctggtcaagcctggggggtccctgagactctcctgttcagcctctggattcaccttcaatatctatgccatgaactgggtccgccaggttccaggaaaggggctggattgggtctcatccattagtagtaggggtgattacatatactacgcagagtcagtggagggccgattcaccatctccagagacaacgccaagaactcactgtatctggaaatgaacagcctgagagccgaggacacggctgtgtattactgtgcgagag

SEQ ID NO: 1370 - DNA, 284 bp, Homo sapiens
gacatccagatgacccagtctccatcctccctgtctgcatctgttggagacagagtcaccatctcttgccaggcgagtcaggatattaccaactttttaaattggtaccagcagaaatctggggaagcccctaagctcctgatctacgatgcatccgatttggaaacaggggtcccatcaaggttcagtggaagtggatctgggacagattttactttcaccatcagcaggctgcagcctgaagacactgcaacatattactgtcaacagtatgacgatctccc

SEQ ID NO: 1371 - DNA, 75 bp, Homo sapiens
gaggtgcagctggtggagtctgggggaggcctggtcaagcctggggggtccctgagactctcctgtacagcctct

SEQ ID NO: 1372 - DNA, 78 bp, Homo sapiens
gaaatagtgatgacgcagtctccagccaccctgtctgtgtctccaggggaaagagccaccctctcctgcagggccagt

SEQ ID NO: 1373 - DNA, 75 bp, Homo sapiens
gaggtgcagctggtggagtcggggggaggcctggtcaagcctgaggggtccctgagactctcatgtgaagcctct

SEQ ID NO: 1374 - DNA, 78 bp, Homo sapiens
gacatccagttgacccagtctccatccttcctgtctgcatttgttggagacagagtcaccatcacttgccgggccagt

SEQ ID NO: 1375 - DNA, 75 bp, Homo sapiens
caggtgcagctggtggagtctgggggaggcgtggtccagcctgggaggtccctgagactctcctgtgcagcctct

SEQ ID NO: 1376 - DNA, 78 bp, Homo sapiens
gacatccagatgacccagtctccttccaccctgtctgcatctgtaggagacagagtcaccatcacttgccgggccagt

SEQ ID NO: 1377 - DNA, 74 bp, Homo sapiens
aggtgcagctggtggagtcggggggaggcttggtcgagcctggggggtccctgagactctcctgtgcagcctct

SEQ ID NO: 1378 - DNA, 78 bp, Homo sapiens
gaaattgtgttgacgcagtctccaggcaccctgtctttgtctccaggggaaagagccaccctctcctgcagggccagt

SEQ ID NO: 1379 - DNA, 75 bp, Homo sapiens
gaggtgcagctggtggagtctgggggaggctgggtccagccgggggggtccctgagactctcctgtgaagcctct

SEQ ID NO: 1380 - DNA, 74 bp, Homo sapiens
ttgtgatgactcagtctccactctccctgcccgtcacccttggacagccggcctccatctcctgcaggtctagt

SEQ ID NO: 1381 - DNA, 75 bp, Homo sapiens
caggtgcagctggtggagtctgggggaggcttggtcaagcctggagggtccctgagactctcctgtgcagcctct

SEQ ID NO: 1382 - DNA, 78 bp, Homo sapiens
gacatccagttgacccagtctccatccttcctgtctgcatctgtaggagacagagtcaccatcacttgccgggccaat

SEQ ID NO: 1383 - DNA, 75 bp, Homo sapiens
gaggtgcagctgttggagtctgggggaggcttggtacagccgggggggtccctgagactctcctgcgcagcctct

SEQ ID NO: 1384 - DNA, 78 bp, Homo sapiens
gaaattgtgttgacacagtctccagccaccctgtctttgtctccaggggaaagagccaccctctcctgcagggccagt

SEQ ID NO: 1385 - DNA, 75 bp, Homo sapiens
gaggtgcagctgttggagtctgggggagacttggtacaacctggggggtccctgagactctcctgtgttgtctct

SEQ ID NO: 1386 - DNA, 78 bp, Homo sapiens
gaaattgtgttgacacagtctccggccaccctgtctttgtctccaggggaaagagccaccctctcctgcagggccagt

SEQ ID NO: 1387 - DNA, 75 bp, Homo sapiens
caggtgcagctgcaggagtcgggcccaggactggtgaagccttcggggaccctgtccctcacctgcgctgtctct

SEQ ID NO: 1388 - DNA, 78 bp, Homo sapiens; identical to SEQ ID NO: 1378

SEQ ID NO: 1389 - DNA, 75 bp, Homo sapiens
gaggtgcagctggtgcagtctggagtagaggtgaagaagcccggggagtctctgaagatctcctgtaagggctct

SEQ ID NO: 1390 - DNA, 78 bp, Homo sapiens
gacatcgtgatgacccagtctccagactccctggctgtgtctctgggcgagagggccaccatcaactgcaggtccagc

SEQ ID NO: 1391 - DNA, 75 bp, Homo sapiens; identical to SEQ ID NO: 1387

SEQ ID NO: 1392 - DNA, 78 bp, Homo sapiens; identical to SEQ ID NO: 1384

SEQ ID NO: 1393 - DNA, 75 bp, Homo sapiens
caggtgcagctggtgcagtctgggtctgagttgaagaagcctggggcctcagtgaaggtttcctgcaaggcttct

SEQ ID NO: 1394 - DNA, 78 bp, Homo sapiens
gacatccagatgacccagtctccttccaccctgtctgcatctgtaggagacagagtctccatcacttgccgggccagt

SEQ ID NO: 1395 - DNA, 75 bp, Homo sapiens
caggtgcagctggtgcagtctgggtctgagttgaagaagcctggggcctcagtgaaggtttcctgcaaggcttca

SEQ ID NO: 1396 - DNA, 78 bp, Homo sapiens; identical to SEQ ID NO: 1376

SEQ ID NO: 1397 - DNA, 75 bp, Homo sapiens
caggtgcagctggtgcagtctggaagtgaggtgaagaggccaggggcctcagtgcaggtctcctgcaagacttct

SEQ ID NO: 1398 - DNA, 78 bp, Homo sapiens
gatgttgtgatgactcagtctccactcgccctgcccgtcacccttggacagtcggcctccatctcctgcaggtccagt

SEQ ID NO: 1399 - DNA, 75 bp, Homo sapiens
caggtgcagctacagcagtggggcgcaggactgttgaagccttcggagaccctgtccctcacctgcgctgtctat

SEQ ID NO: 1400 - DNA, 78 bp, Homo sapiens; identical to SEQ ID NO: 1384

SEQ ID NO: 1401 - DNA, 78 bp, Homo sapiens
gatattgtgatgactcagtctccactctccctgcccgtcacccctggagagccggcctccatctcctgcaggtctagt

SEQ ID NO: 1402 - DNA, 75 bp, Homo sapiens
caggtgcagctgcaggagtcgggcccaggactggtgaagccttcacagaccctgtccctcacctgcactgtctct

SEQ ID NO: 1403 - DNA, 78 bp, Homo sapiens
gacatcgtgatgacccagtctccagactccctggctgtgcctctgggcgagagggccaccatcaactgcaagtccagc

SEQ ID NO: 1404 - DNA, 75 bp, Homo sapiens
caggtgcagctgcaggagtcgggcccaggactggtgaagccttcggagaccctgtccctcacctgctctgtctct

SEQ ID NO: 1405 - DNA, 78 bp, Homo sapiens; identical to SEQ ID NO: 1372

SEQ ID NO: 1406 - DNA, 75 bp, Homo sapiens
caggtgcagctggtgcagtctgggactgaggtgaagaagcctgagtcctcggtgaaggtctcctgcgaggcttct

SEQ ID NO: 1407 - DNA, 78 bp, Homo sapiens
gacatccagatgacccagtctccatcctccctgtctgcatctgtgggagacagagtcaccttcacttgccaggcgagt

SEQ ID NO: 1408 - DNA, 75 bp, Homo sapiens
caggtgcagctggtgcagtctggggctgagctgaagaagcctgggtcctcggtgaaggtctcctgcaagacttct

SEQ ID NO: 1409 - DNA, 78 bp, Homo sapiens
gacatccagatgacccagtctccttccaccctgtctgcatctgtaggagacagagtcaccatcgcttgccgggccagt

SEQ ID NO: 1410 - DNA, 75 bp, Homo sapiens
cggctgcagctgcaggagtcgggcccaggactggtgaagccttcggagaccctgtccctcacctgcactgcctct

SEQ ID NO: 1411 - DNA, 78 bp, Homo sapiens
gaaatagtgatgacgcagtctccagccaccgtgtctgtgtctccaggggaaagagccaccctctcctgcagggccagt

SEQ ID NO: 1412 - DNA, 75 bp, Homo sapiens
gaagtgcagctggtggagtctgggggaggcttggtacagcctggcaggtccctgcgactctcctgcgcagcctct

SEQ ID NO: 1413 - DNA, 78 bp, Homo sapiens
gaaatagtgatgacgcagtctccagccaccctgtctgtgtctccaggggaaagagccaccctctcttgcagggccagt

SEQ ID NO: 1414 - DNA, 75 bp, Homo sapiens
caggtgcagctgcaggagtcgggcccaggactggtgaagccttcggagaccctgtccctcacctgcgctgtctct

SEQ ID NO: 1415 - DNA, 78 bp, Homo sapiens
gatattgtgatgacccagactccactctcctcacctgtcacccttggacagccggcctccatctcctgcaggtctagt

SEQ ID NO: 1416 - DNA, 75 bp, Homo sapiens
caggtgcagctggtgcagtctggagctgaggtgaagaagcctggggcctcagtgaaggtctcctgtcaggcttct

SEQ ID NO: 1417 - DNA, 78 bp, Homo sapiens; identical to SEQ ID NO: 1378

SEQ ID NO: 1418 - DNA, 75 bp, Homo sapiens
caggtgcagctgcaggagtcgggcccaggactggtgaggccttcacagaccctgtccctcacctgcactgtctct

SEQ ID NO: 1419 - DNA, 78 bp, Homo sapiens
gacatccagatgacccagtctccatcctccctgtctgcatctgtaggagacagaatcaccatcacttgccgggcgagt

SEQ ID NO: 1420 - DNA, 75 bp, Homo sapiens
caggtgcagctggtgcagtctggggctgaggtaaagaagcctgggtcctccgtgaaggtctcctgcaaggcctct

SEQ ID NO: 1421 - DNA, 78 bp, Homo sapiens
gacatccagatgacccagtctccttccactctgtctgcgtctgtgggagacagagtcaccatcacttgccgggccagt

SEQ ID NO: 1422 - DNA, 75 bp, Homo sapiens; identical to SEQ ID NO: 1402

SEQ ID NO: 1423 - DNA, 78 bp, Homo sapiens
gacatccagatgacccagtctccatcctccctgtctgcatctgtaggagacagagtcactatcacttgccgggcaggt

SEQ ID NO: 1424 - DNA, 75 bp, Homo sapiens
caggtgcagctggtgcagtctggggctgaggtgaagaagcctgggtcctcggtgaaggtctcctgtaaggcttct

SEQ ID NO: 1425 - DNA, 78 bp, Homo sapiens
gacatcgtgatgacccagtctccagactccctggctgtgtctctgggcgagagggccaccatcaactgcaagtccagc

SEQ ID NO: 1426 - DNA, 75 bp, Homo sapiens
caggtgcagctgcaggagtcgggcccaggactggtgaagccttcggagaccctgtccctcacctgcactgtctct

SEQ ID NO: 1427 - DNA, 78 bp, Homo sapiens
gacatccagatgacccagtctccatcctccctgtctgcatctgtcggagacagagtcaccatcacttgccgggcgagt

SEQ ID NO: 1428 - DNA, 75 bp, Homo sapiens
caggtgcagctggtgcagtctggagctgaggtgaagaggcctggggcctcagtgaggatcgcctgcaaggcttct

SEQ ID NO: 1429 - DNA, 78 bp, Homo sapiens
gacatccagatgacccagtctccatcgtccctgtctgcatctgtaggagacagagtcaccatcacttgccgggcgagt

SEQ ID NO: 1430 - DNA, 75 bp, Homo sapiens
caggtgcagctggtgcagtctggggctgaggtgaagaagcctgggtcctcggtgaaggtctcctgcagggcctct

SEQ ID NO: 1431 - DNA, 78 bp, Homo sapiens; identical to SEQ ID NO: 1378

SEQ ID NO: 1432 - DNA, 75 bp, Homo sapiens
caggtgcagctggtgcagtctgggactgaggtgaagaagcctgggtcgtcggtgaggatctcctgcgaggcctct

SEQ ID NO: 1433 - DNA, 78 bp, Homo sapiens
gatattgtgatgactcagtctccactctccctgcccgccacccctggagagtcggcctccatctcctgcaggtctagt

SEQ ID NO: 1434 - DNA, 75 bp, Homo sapiens
caggtgcagctggtgcagtctggggctgaagtgaagaagcctgggtcctcggtgaaggtctcctgcaaggcttct

SEQ ID NO: 1435 - DNA, 78 bp, Homo sapiens
gaaattgtgttgacgcagtctccaggcaccctgtctttgtctccaggggacagagccaccctctcctgcagggccagt

SEQ ID NO: 1436 - DNA, 75 bp, Homo sapiens
caggtgcagctggtgcagtctggggctgaggtgaagaagcctgggtcctcggtgaaggtctcctgcaaggcctct

SEQ ID NO: 1437 - DNA, 78 bp, Homo sapiens; identical to SEQ ID NO: 1372

SEQ ID NO: 1438 - DNA, 75 bp, Homo sapiens
gaggtgcagctgttggagtctgggggaggcttggtacagcctggggggtccctgagactctcctgtgcagcctct

SEQ ID NO: 1439 - DNA, 78 bp, Homo sapiens; identical to SEQ ID NO: 1401

SEQ ID NO: 1440 - DNA, 75 bp, Homo sapiens
gaggtgcagctggtggagtctgggggaggcctggtcaagccggggggctccctgagactctcctgtgcagcctct

SEQ ID NO: 1441 - DNA, 78 bp, Homo sapiens
gaaattgtgttgacgcagtctccaggcacactgtctttgtctccaggggaaagagccaccctctcctgcagggccagt

SEQ ID NO: 1442 - DNA, 75 bp, Homo sapiens
gaggtgcagctggtgcagtctggagcagaggtgaaaaagcccggggggtctctgaagatctcctgtaagacttct

SEQ ID NO: 1443 - DNA, 78 bp, Homo sapiens
gaaattgtgttgacgcagtctccaggtaccctgtctttgtctccaggggaaagagccaccctctcctgcagggccagt

SEQ ID NO: 1444 - DNA, 75 bp, Homo sapiens
gaggtgcagctgttggagtctgggggaggcttggtacagcctggggggtccctgagactctcctgtgaagcctcc

SEQ ID NO: 1445 - DNA, 78 bp, Homo sapiens
gacatcgtgatgacccagtctccagactccctggctgtgtctctgggcgagacggccaccatcaactgcaggtccagc

SEQ ID NO: 1446 - DNA, 75 bp, Homo sapiens
caggtgcagctggtgcagtctggggctgaggtgaagatgcctgggtcctcggtgaaggtctcctgcagggcttct

SEQ ID NO: 1447 - DNA, 78 bp, Homo sapiens
gaaattgtgttgacacagtctccagccaccctgtctttgtctgcaggggaaagagccaccctctcctgcagggccagt

SEQ ID NO: 1448 - DNA, 75 bp, Homo sapiens
gaagtgcagctggtggagtctgggggaggcttggtacagcccggcgggtccctgagactctcctgtgcagtctct

SEQ ID NO: 1449 - DNA, 78 bp, Homo sapiens
gaaatagtgatgacgcagtctccagccaccctgtctgtgtctccaggtgaaagagccaccctctcctgcagggccagt

SEQ ID NO: 1450 - DNA, 75 bp, Homo sapiens
gaggtgcagctggtggagtctgggggaggcttggtccagcctggggggtccctgagactctcctgttcagcctct

SEQ ID NO: 1451 - DNA, 78 bp, Homo sapiens
gacatccagatgacccagtctccatcctccctgtctgcatctgtaggagacagagtcaccatcacttgccgggcaagt

SEQ ID NO: 1452 - DNA, 75 bp, Homo sapiens
caggtgcagctggtggagtctgggggaggcgtggtccagcctgggaggtccctgagactctcctgtgcagcgtct

SEQ ID NO: 1453 - DNA, 75 bp, Homo sapiens
gaggtgcagctggtggagtctgggggaggcctggtcaagcctggggggtccctgagactctcctgtgcagcctct

SEQ ID NO: 1454 - DNA, 78 bp, Homo sapiens; identical to SEQ ID NO: 1372

SEQ ID NO: 1455 - DNA, 75 bp, Homo sapiens; identical to SEQ ID NO: 1452

SEQ ID NO: 1456 - DNA, 78 bp, Homo sapiens; identical to SEQ ID NO: 1451

SEQ ID NO: 1457 - DNA, 75 bp, Homo sapiens
caggtgcagctgcaggagtcgggcccaggactggtgaagccttcggacaccctgttcctcacctgcgctgtctct

SEQ ID NO: 1458 - DNA, 78 bp, Homo sapiens
gacatccagatgacccagtctccttccacgctgtctgcatctgtaggagacagagtcaccatcacttgccgggccagt

SEQ ID NO: 1459 - DNA, 78 bp, Homo sapiens; identical to SEQ ID NO: 1372

SEQ ID NO: 1460 - DNA, 75 bp, Homo sapiens
gaggtgcagctggtggagtctgggggaggcctggtcaagcctggggggtccctgagactctcctgttcagcctct

SEQ ID NO: 1461 - DNA, 78 bp, Homo sapiens
gacatccagatgacccagtctccatcctccctgtctgcatctgttggagacagagtcaccatctcttgccaggcgagt

SEQ ID NO: 1462 - DNA, 24 bp, Homo sapiens
ggattcaacttcaacaaccatggc

SEQ ID NO: 1463 - DNA, 18 bp, Homo sapiens
cagagtgttagtagctac

SEQ ID NO: 1464 - DNA, 24 bp, Homo sapiens
ggattcatcatcgatacctatagc

SEQ ID NO: 1465 - DNA, 18 bp, Homo sapiens
cagggcattagcaattat

SEQ ID NO: 1466 - DNA, 24 bp, Homo sapiens
ggattcaccttcagtaattttggc

SEQ ID NO: 1467 - DNA, 18 bp, Homo sapiens
cagaatattaatacttgg

SEQ ID NO: 1468 - DNA, 24 bp, Homo sapiens
ggattcaccttcagtgactaccaa

SEQ ID NO: 1469 - DNA, 21 bp, Homo sapiens
cagagtgttaccggcggcttt

SEQ ID NO: 1470 - DNA, 24 bp, Homo sapiens
gggttcacctttagtttgttttgg

SEQ ID NO: 1471 - DNA, 33 bp, Homo sapiens
caaggcctcgtgtccagtgatggaagcacctac

SEQ ID NO: 1472 - DNA, 24 bp, Homo sapiens
ggtttcaccttcagtggttactac

SEQ ID NO: 1473 - DNA, 18 bp, Homo sapiens
cagggcattagcagttct

SEQ ID NO: 1474 - DNA, 24 bp, Homo sapiens
ggactcaattttatcagctatgcc

SEQ ID NO: 1475 - DNA, 18 bp, Homo sapiens
caaagtgttagattttac

SEQ ID NO: 1476 - DNA, 24 bp, Homo sapiens
ggatacacctttgactactctgcc

SEQ ID NO: 1477 - DNA, 18 bp, Homo sapiens
cagagtgttagccactac

SEQ ID NO: 1478 - DNA, 27 bp, Homo sapiens
ggtgtctccatcagcatgattaactgg

SEQ ID NO: 1479 - DNA, 21 bp, Homo sapiens
cagagtattagcaacaactac

SEQ ID NO: 1480 - DNA, 24 bp, Homo sapiens
ggatacagctttaccaactactgg

SEQ ID NO: 1481 - DNA, 36 bp, Homo sapiens
cagaatgttttacacagctccaagaataagaattac

SEQ ID NO: 1482 - DNA, 27 bp, Homo sapiens
ggtgcctccatcagcagtactaactgg

SEQ ID NO: 1483 - DNA, 18 bp, Homo sapiens
cagagtgttagcagctac

SEQ ID NO: 1484 - DNA, 24 bp, Homo sapiens
ggatacaccttcactacctattct

SEQ ID NO: 1485 - DNA, 18 bp, Homo sapiens
cagactattagtacttgg

SEQ ID NO: 1486 - DNA, 24 bp, Homo sapiens
ggatacaccttcactagctatgca

SEQ ID NO: 1487 - DNA, 18 bp, Homo sapiens
cagactattattagctgg

SEQ ID NO: 1488 - DNA, 24 bp, Homo sapiens
ggttacacttttagcgattatggt

SEQ ID NO: 1489 - DNA, 33 bp, Homo sapiens
caaagcctcgtagacagagatggaaacatctac

SEQ ID NO: 1490 - DNA, 24 bp, Homo sapiens
ggggggtccttcggtggttactac

SEQ ID NO: 1491 - DNA, 18 bp, Homo sapiens
cagagtgttagcagctac

SEQ ID NO: 1492 - DNA, 33 bp, Homo sapiens
cagagcctcctgcatagtagtggatacaactat

SEQ ID NO: 1493 - DNA, 30 bp, Homo sapiens
ggtgcctccatcaacagtggtggttactac

SEQ ID NO: 1494 - DNA, 36 bp, Homo sapiens
cagagtgtttcatacagctccaccaataagaactgc

SEQ ID NO: 1495 - DNA, 30 bp, Homo sapiens
ggtggctccgtcagcagtggtatttaccac

SEQ ID NO: 1496 - DNA, 18 bp, Homo sapiens
aagagtattagcagcaac

SEQ ID NO: 1497 - DNA, 24 bp, Homo sapiens
ggaggccccttcggcagctatgct

SEQ ID NO: 1498 - DNA, 18 bp, Homo sapiens
caggacattagcaactct

SEQ ID NO: 1499 - DNA, 24 bp, Homo sapiens
ggaggcacctccaacaactatcct

SEQ ID NO: 1500 - DNA, 18 bp, Homo sapiens
cagagtattagtgactgg

SEQ ID NO: 1501 - DNA, 30 bp, Homo sapiens
ggtggctccgtcaacagcggtggttactac

SEQ ID NO: 1502 - DNA, 18 bp, Homo sapiens
cagagtgttaccaacaac

SEQ ID NO: 1503 - DNA, 24 bp, Homo sapiens
ggattcacctttgatgattatgcc

SEQ ID NO: 1504 - DNA, 18 bp, Homo sapiens
gagggtattagcagccac

SEQ ID NO: 1505 - DNA, 27 bp, Homo sapiens
ggttattccatcagcagtggttactac

SEQ ID NO: 1506 - DNA, 33 bp, Homo sapiens
caaagcctcgtacacagtgatggaaacacctac

SEQ ID NO: 1507 - DNA, 24 bp, Homo sapiens
ggttatacctttagcagctatggt

SEQ ID NO: 1508 - DNA, 21 bp, Homo sapiens
cagagtattagcagcagttac

SEQ ID NO: 1509 - DNA, 30 bp, Homo sapiens
ggcgactccatcaatagtggtggttactac

SEQ ID NO: 1510 - DNA, 18 bp, Homo sapiens
cagggcattaggaactat

SEQ ID NO: 1511 - DNA, 24 bp, Homo sapiens
gggatgacctcgaacagccttgcc

SEQ ID NO: 1512 - DNA, 18 bp, Homo sapiens
cagactattactacgtgg

SEQ ID NO: 1513 - DNA, 30 bp, Homo sapiens
ggtgcctccatcagcagtggtgattcctac

SEQ ID NO: 1514 - DNA, 18 bp, Homo sapiens
cagaacgttagagactat

SEQ ID NO: 1515 - DNA, 24 bp, Homo sapiens
ggaggcagcttcagcacctatgct

SEQ ID NO: 1516 - DNA, 36 bp, Homo sapiens
cagagtgttttgttcagctccaacaataagcactac

SEQ ID NO: 1517 - DNA, 24 bp, Homo sapiens
ggtgattccatcaggaattactac

SEQ ID NO: 1518 - DNA, 18 bp, Homo sapiens
cagaccattaaaaaatat

SEQ ID NO: 1519 - DNA, 24 bp, Homo sapiens
ggtgacactttaacaagttttggt

SEQ ID NO: 1520 - DNA, 18 bp, Homo sapiens
cggggcattgccgattat

SEQ ID NO: 1521 - DNA, 24 bp, Homo sapiens
ggaggcattttcagaagtaatgct

SEQ ID NO: 1522 - DNA, 21 bp, Homo sapiens
cagagtgttagcagcaactat

SEQ ID NO: 1523 - DNA, 24 bp, Homo sapiens
ggagccaccttcagcagtcttggg

SEQ ID NO: 1524 - DNA, 33 bp, Homo sapiens
cagatcctcctgcatggaaatggaaacaactat

SEQ ID NO: 1525 - DNA, 24 bp, Homo sapiens
ggaggcaccttcggcagttatggt

SEQ ID NO: 1526 - DNA, 21 bp, Homo sapiens
cagagggttagcaacaatttc

SEQ ID NO: 1527 - DNA, 24 bp, Homo sapiens
ggaggcaccttcagaaactttgct

SEQ ID NO: 1528 - DNA, 18 bp, Homo sapiens
cagagtgttagcagtaac

SEQ ID NO: 1529 - DNA, 24 bp, Homo sapiens
ggattcacctttagcagctatgcc

SEQ ID NO: 1530 - DNA, 33 bp, Homo sapiens
cagagcctcctacatactaatggatacagctat

SEQ ID NO: 1531 - DNA, 24 bp, Homo sapiens
ggattctactttagtgactatggc

SEQ ID NO: 1532 - DNA, 21 bp, Homo sapiens
cagactgttagcagcaccttc

SEQ ID NO: 1533 - DNA, 24 bp, Homo sapiens
ggatacagctttaacacctactgg

SEQ ID NO: 1534 - DNA, 21 bp, Homo sapiens
cagactgttagcggcagcttc

SEQ ID NO: 1535 - DNA, 24 bp, Homo sapiens
ggattcacctttacgagctttggc

SEQ ID NO: 1536 - DNA, 36 bp, Homo sapiens
cagagtgttttatatccttccaacagtaggaactac

SEQ ID NO: 1537 - DNA, 24 bp, Homo sapiens
ggaggcaccttcagcacctatact

SEQ ID NO: 1538 - DNA, 18 bp, Homo sapiens
cagagtgttagcagctac

SEQ ID NO: 1539 - DNA, 24 bp, Homo sapiens
ggattcagatttgaagactatgcc

SEQ ID NO: 1540 - DNA, 18 bp, Homo sapiens
cagagtgctagcaacaac

SEQ ID NO: 1541 - DNA, 24 bp, Homo sapiens
ggattcaccttcagtagctatgct

SEQ ID NO: 1542 - DNA, 18 bp, Homo sapiens
cagagcattagcatctct

SEQ ID NO: 1543 - DNA, 24 bp, Homo sapiens
ggattcaccttcagtacctatggc

SEQ ID NO: 1544 - DNA, 24 bp, Homo sapiens
ggattcaccttcagttcctatagc

SEQ ID NO: 1545 - DNA, 18 bp, Homo sapiens
cagagtgttagcagcaac

SEQ ID NO: 1546 - DNA, 24 bp, Homo sapiens
ggattcaccttcagtacctatggc

SEQ ID NO: 1547 - DNA, 18 bp, Homo sapiens
cagagcattagcatctct

SEQ ID NO: 1548 - DNA, 27 bp, Homo sapiens
ggttactccatcgacagtggtcactgg

SEQ ID NO: 1549 - DNA, 18 bp, Homo sapiens
cagagcattagtaactgg

SEQ ID NO: 1550 - DNA, 18 bp, Homo sapiens
cagagtgttagcagcaac

SEQ ID NO: 1551 - DNA, 24 bp, Homo sapiens
ggattcaccttcaatatctatgcc

SEQ ID NO: 1552 - DNA, 18 bp, Homo sapiens
caggatattaccaacttt

SEQ ID NO: 1553 - DNA, 51 bp, Homo sapiens
atgaactggctccgccaggctccagggaaggggctggagtgggtcgcttcc

SEQ ID NO: 1554 - DNA, 51 bp, Homo sapiens
ttagcctggtaccagcagaaacctggccaggctcccaggctcctcatctat

SEQ ID NO: 1555 - DNA, 51 bp, Homo sapiens
atgaactgggtccgccaggctccagggaaggggctggaatgggtctcaacc

SEQ ID NO: 1556 - DNA, 51 bp, Homo sapiens
ttcgcctggtatcagcaaaaaccagggacagcccctaagctcctgatccac

SEQ ID NO: 1557 - DNA, 51 bp, Homo sapiens
atgtactgggtccgccaggctccaggcaagggactggactgggtggcagtt

SEQ ID NO: 1558 - DNA, 51 bp, Homo sapiens
ttggcctggtatcagcagaaaccaggggaagcccctaatctcttgatcttt

SEQ ID NO: 1559 - DNA, 51 bp, Homo sapiens
atgagctggatccgccaggctccagggaaggggctggagtggctttcagac

SEQ ID NO: 1560 - DNA, 51 bp, Homo sapiens
ttagcctggtaccagcagaagcctggccaggctcccaggctcctcatatat

SEQ ID NO: 1561 - DNA, 51 bp, Homo sapiens
atgggctgggtccgccaggctccagggaaggggctggagtgggtggccacc

SEQ ID NO: 1562 - DNA, 51 bp, Homo sapiens
ttgagctggtatcagcagaggccaggccaatctccgaggcgccttttttat

SEQ ID NO: 1563 - DNA, 51 bp, Homo sapiens
atgagctgggtccgccaggctccagggaaggggctggagtgggtttcatac

SEQ ID NO: 1564 - DNA, 51 bp, Homo sapiens
ttagcctggtatcaacaaagaccagggaaagcccctaagctcctgatctat

SEQ ID NO: 1565 - DNA, 51 bp, Homo sapiens
atgagttgggtccgccaggctccagggaggggactggagtgggtctcagtt

SEQ ID NO: 1566 - DNA, 51 bp, Homo sapiens; identical to SEQ ID NO: 1554

SEQ ID NO: 1567 - DNA, 51 bp, Homo sapiens
atgaattgggtccgccaggctccagggaaggggctggagtgggtctcaaca

SEQ ID NO: 1568 - DNA, 51 bp, Homo sapiens
ttagcctggttccaacaaaaacctggccagcctcccaggctcctcatttat

SEQ ID NO: 1569 - DNA, 51 bp, Homo sapiens
tggacttgggtccgccagcccccagggaaggggctggagtggattggggaa

SEQ ID NO: 1570 - DNA, 51 bp, Homo sapiens; identical to SEQ ID NO: 1554

SEQ ID NO: 1571 - DNA, 51 bp, Homo sapiens
atcggctgggtgcgccaggtgcccgggaaaggcctggagtggatggggtcc

SEQ ID NO: 1572 - DNA, 51 bp, Homo sapiens
ttgggttggtaccagcacaaaccaggacagcctcctaagttactcatttac

SEQ ID NO: 1573 - DNA, 51 bp, Homo sapiens
tggagttgggtccgccagcccccagggaaggggctggagtggattggggaa

SEQ ID NO: 1574 - DNA, 51 bp, Homo sapiens
ttagcctggtaccaacagaaacctggccaggctcccaggctcctcatctat

SEQ ID NO: 1575 - DNA, 51 bp, Homo sapiens
atgaattgggtgcgacaggcccctggacaaggacttgagtggatgggatgg

SEQ ID NO: 1576 - DNA, 51 bp, Homo sapiens
ttggcctggtatcagcagaaaccagggaaagcccctaagctcctgatctat

SEQ ID NO: 1577 - DNA, 51 bp, Homo sapiens
atgaattgggtgcgacaggcccctggacaagggcttgagtggatgggatgg

SEQ ID NO: 1578 - DNA, 51 bp, Homo sapiens; identical to SEQ ID NO: 1576

SEQ ID NO: 1579 - DNA, 51 bp, Homo sapiens
atgagttgggtgcgacaggcccctggacaaggacttgagtggatgggatgg

SEQ ID NO: 1580 - DNA, 51 bp, Homo sapiens
ttgatttggtttcaccagaggccaggccaatctccaaggcgcctaatttat

SEQ ID NO: 1581 - DNA, 51 bp, Homo sapiens
tggaattggatccgtcagcccccagggaaggggctggagtggattggggaa

SEQ ID NO: 1582 - DNA, 51 bp, Homo sapiens
ttagcctggtatcaacagaaacctggccaggctcccaggctcctcatctat

SEQ ID NO: 1583 - DNA, 51 bp, Homo sapiens
ttagattggtacctgcagaagccagggcagtctccacaggtcctgatctat

SEQ ID NO: 1584 - DNA, 51 bp, Homo sapiens
tggagctggatccgccagcacccagggaagggcctggagtggattgggtac

SEQ ID NO: 1585 - DNA, 51 bp, Homo sapiens
ttagcttggtaccagcagaaatcaggacagcctcctaaactgctcatttac

SEQ ID NO: 1586 - DNA, 51 bp, Homo sapiens
tggacctggattcggcagcccccagggaagggactggagtggattggctat

SEQ ID NO: 1587 - DNA, 51 bp, Homo sapiens
ttagcctggtaccagcaggaacctggccaggctcccaggctcctcatctat

SEQ ID NO: 1588 - DNA, 51 bp, Homo sapiens
gtcagctgggtgcgacaggcccctggacaacgacttgagtggattggaggg

SEQ ID NO: 1589 - DNA, 51 bp, Homo sapiens
ttaaattggtatcagcagaaaccagggaaagccccaaacatcctaatttac

SEQ ID NO: 1590 - DNA, 51 bp, Homo sapiens
atcagctgggtgcgacaggcccctggacaaggacttgagtggatgggaggg

SEQ ID NO: 1591 - DNA, 51 bp, Homo sapiens
ttggcctggtatcagcagaaaccaggaaaagcccctaaactcctgatccat

SEQ ID NO: 1592 - DNA, 51 bp, Homo sapiens
tggggctggatccgccagcccccagggaaggggccggagtggattgggact

SEQ ID NO: 1593 - DNA, 51 bp, Homo sapiens
gtagcctggtaccagcagaaacctggccaggctcccaggctcctcatctat

SEQ ID NO: 1594 - DNA, 51 bp, Homo sapiens
atgacgtgggtccggcaggctccagggaagggcctggagtgggtctcaggt

SEQ ID NO: 1595 - DNA, 51 bp, Homo sapiens
ttagcctggtaccagcagagacctggccaggctcccaggctcctcatctat

SEQ ID NO: 1596 - DNA, 51 bp, Homo sapiens
tggggctggatccggcagcccccagggaaggggctggagtggattgggagt

SEQ ID NO: 1597 - DNA, 51 bp, Homo sapiens
ttgagttggcttcagcagaggccaggccagcctccaagactcctaatttat

SEQ ID NO: 1598 - DNA, 51 bp, Homo sapiens
atcagctgggtgcgacaggcccctggacaagggcttgagtggatgggatgg

SEQ ID NO: 1599 - DNA, 51 bp, Homo sapiens
ttagcctggtaccagcggaaacctggccaggctcccaggctcctcatctat

SEQ ID NO: 1600 - DNA, 51 bp, Homo sapiens
tggaattggatccgccagcccccagggaagggccttgagtggattggatac

SEQ ID NO: 1601 - DNA, 51 bp, Homo sapiens
gtagcctggtatcagcagaaaccaggtagagttcctaagctcctgatctat

SEQ ID NO: 1602 - DNA, 51 bp, Homo sapiens
atcagctgggtgcgacaggcccctggacaaggacttgagtggatgggaggc

SEQ ID NO: 1603 - DNA, 51 bp, Homo sapiens
ctggcctggtatcagcagaaaccagggcaagcccctaagctcctcatccat

SEQ ID NO: 1604 - DNA, 51 bp, Homo sapiens
tggagttggatccgccagcccccagggaagggcctggagtggattgggtac

SEQ ID NO: 1605 - DNA, 51 bp, Homo sapiens
ttaaattggtatcagcagaaaccagggaaagccccgaagctcctgatctac

SEQ ID NO: 1606 - DNA, 51 bp, Homo sapiens
atcaactgggtgcgacaggcccctggacaagggcttgagtggatgggaggc

SEQ ID NO: 1607 - DNA, 51 bp, Homo sapiens
ttggcttggttccagcaaaaaccaggacagccccctaaactgctcatttac

SEQ ID NO: 1608 - DNA, 51 bp, Homo sapiens
tggagctggatccggcaggccccagggaagggactggagtccattggatat

SEQ ID NO: 1609 - DNA, 51 bp, Homo sapiens
ttaaattggtatcagcaggaaccagggaaagcccctaaactcctgatctat

SEQ ID NO: 1610 - DNA, 51 bp, Homo sapiens
tttagttgggtgcgacaggcccgtggacaaggacttgagtggatgggatgg

SEQ ID NO: 1611 - DNA, 51 bp, Homo sapiens
ttagcctggtatcagcagaaaccagggaaagttcctcagctcctgatctat

SEQ ID NO: 1612 - DNA, 51 bp, Homo sapiens
atcagctgggtgcgacaggcccctggacaagggcttgagtggatgggagaa

SEQ ID NO: 1613 - DNA, 51 bp, Homo sapiens
ttagcctggtaccagcaaaaacctggccaggctcccaggctcctcatctat

SEQ ID NO: 1614 - DNA, 51 bp, Homo sapiens
atcaattggttccgtctgggccctggacaagggcttgagtggatgggagcg

SEQ ID NO: 1615 - DNA, 51 bp, Homo sapiens
ttggattggtacgtgcagaagcccggtcagtctccgcagctgttgatctat

SEQ ID NO: 1616 - DNA, 51 bp, Homo sapiens
attaactgggtgcgacaggcccctggacaagggcttgagtggatgggaggc

SEQ ID NO: 1617 - DNA, 51 bp, Homo sapiens
ttagcctggtatcagcagaaacctggcctggctcccagactcctcttctat

SEQ ID NO: 1618 - DNA, 51 bp, Homo sapiens
gtcagctgggtgcgacaggcccctggacaagggcctgagtggatgggaggg

SEQ ID NO: 1619 - DNA, 51 bp, Homo sapiens
ttagcctggtaccagcagacacctggccaggctcccaggctcctcatctat

SEQ ID NO: 1620 - DNA, 51 bp, Homo sapiens
atgagctgggtccgccaggctccagggaaggggctggagtgggtctcagct

SEQ ID NO: 1621 - DNA, 51 bp, Homo sapiens
gtggattggtacctgcagaagccagggcagtctccacagctcctgatctat

SEQ ID NO: 1622 - DNA, 51 bp, Homo sapiens
atgaactgggtccgccagtctgcagggagggggctggagtggatctcatac

SEQ ID NO: 1623 - DNA, 51 bp, Homo sapiens
ttagcctggtatcagcagaaacctggccaggctcccaggctcctcatcttt

SEQ ID NO: 1624 - DNA, 51 bp, Homo sapiens
atcggctgggtgcgccaggtgcccgggaaaggcctggagtggatgggcatg

SEQ ID NO: 1625 - DNA, 51 bp, Homo sapiens
ttagcctggtaccagcagaaacctggccaggctcccaggctcctcatttat

SEQ ID NO: 1626 - DNA, 51 bp, Homo sapiens
atgaattgggtccgccaggctccagggaaggggctggagtgggtcgcagtc

SEQ ID NO: 1627 - DNA, 51 bp, Homo sapiens
ttagcttggtaccagcagaaaccaggacagcctcctaaactgctcatttac

SEQ ID NO: 1628 - DNA, 51 bp, Homo sapiens
atcacctgggtgcgacaggcccctggacaagggcttgagtggatgggagtc

SEQ ID NO: 1629 - DNA, 51 bp, Homo sapiens
ttagcctggtaccaacagaaacctggccaggctcccaggctcctcatcttt

SEQ ID NO: 1630 - DNA, 51 bp, Homo sapiens
atgcactgggtccggcaagctccagggaagggcctggagtgggtctcaggt

SEQ ID NO: 1631 - DNA, 51 bp, Homo sapiens
ttagcctggtaccagcagaaacctggccagactcccaggctcctcatctat

SEQ ID NO: 1632 - DNA, 51 bp, Homo sapiens
atgcactgggtccgccaggctccagggaagggactggaatatgtttcagct

SEQ ID NO: 1633 - DNA, 51 bp, Homo sapiens
ttaaaatggtatcagcagaaaccagggaaagcccctaagctcctgatctat

SEQ ID NO: 1634 - DNA, 51 bp, Homo sapiens
atgcactgggtccgccaggctccaggcaaggggctggagtgggtggcagtt

SEQ ID NO: 1635 - DNA, 51 bp, Homo sapiens
atgaactgggtccgccaggctccagggaaggggctggagtgggtctcatcc

SEQ ID NO: 1636 - DNA, 51 bp, Homo sapiens; identical to SEQ ID NO: 1554

SEQ ID NO: 1637 - DNA, 51 bp, Homo sapiens; identical to SEQ ID NO: 1634

SEQ ID NO: 1638 - DNA, 51 bp, Homo sapiens
ttaaattggtatcagcagaaaccagggaaagcccctaagctcctgatctat

SEQ ID NO: 1639 - DNA, 51 bp, Homo sapiens
tggggctggatccggcagcccccagggacgggactggagtacattggttac

SEQ ID NO: 1640 - DNA, 51 bp, Homo sapiens; identical to SEQ ID NO: 1576

SEQ ID NO: 1641 - DNA, 51 bp, Homo sapiens
ttagcctggtaccagaacaaacctggccaggctcccagactcctcatctat

SEQ ID NO: 1642 - DNA, 51 bp, Homo sapiens
atgaactgggtccgccaggttccaggaaaggggctggattgggtctcatcc

SEQ ID NO: 1643 - DNA, 51 bp, Homo sapiens
ttaaattggtaccagcagaaatctggggaagcccctaagctcctgatctac

SEQ ID NO: 1644 - DNA, 24 bp, Homo sapiens
attagcagtggtagtagatcccac

SEQ ID NO: 1645 - DNA, 24 bp, Homo sapiens
attagtagtactagtaattacata

SEQ ID NO: 1646 - DNA, 24 bp, Homo sapiens
atatcatatgatggaagtaataca

SEQ ID NO: 1647 - DNA, 24 bp, Homo sapiens
attactagtactggtaatgccaaa

SEQ ID NO: 1648 - DNA, 24 bp, Homo sapiens
atgaagcaagatggaagtgaatat

SEQ ID NO: 1649 - DNA, 24 bp, Homo sapiens
attagtcatcgtggtaatatgata

SEQ ID NO: 1650 - DNA, 24 bp, Homo sapiens
gtgagcggtactggtggaaccaca

SEQ ID NO: 1651 - DNA, 24 bp, Homo sapiens
atttttggcgctgatgctcacaca

SEQ ID NO: 1652 - DNA, 21 bp, Homo sapiens
atctatcataatgggagcacc

SEQ ID NO: 1653 - DNA, 24 bp, Homo sapiens
atctattctggtggctctactacc

SEQ ID NO: 1654 - DNA, 21 bp, Homo sapiens
atctatcataatgggagcacc

SEQ ID NO: 1655 - DNA, 24 bp, Homo sapiens
atcaacacctacactgggaaccca

SEQ ID NO: 1656 - DNA, 24 bp, Homo sapiens
atcaacacctacactggcaaccca

SEQ ID NO: 1657 - DNA, 24 bp, Homo sapiens
attaatgtgaacgttggcaacaca

SEQ ID NO: 1658 - DNA, 21 bp, Homo sapiens
atcaatcatagtggaagcacc

SEQ ID NO: 1659 - DNA, 21 bp, Homo sapiens
atctatttcactgggagaacc

SEQ ID NO: 1660 - DNA, 21 bp, Homo sapiens
atctattacagtgggagcacg

SEQ ID NO: 1661 - DNA, 24 bp, Homo sapiens
atcatccctatctttgggacacca

SEQ ID NO: 1662 - DNA, 24 bp, Homo sapiens
tccatccctatctttaatacacca

SEQ ID NO: 1663 - DNA, 21 bp, Homo sapiens
atctataacagtgggagtgtc

SEQ ID NO: 1664 - DNA, 24 bp, Homo sapiens
attagctgggatagtggtgctata

SEQ ID NO: 1665 - DNA, 21 bp, Homo sapiens
atctattatagtgggagcacg

SEQ ID NO: 1666 - DNA, 24 bp, Homo sapiens
atcagcgcttacagtggtaacaca

SEQ ID NO: 1667 - DNA, 21 bp, Homo sapiens
atctatttcactgggaggacc

SEQ ID NO: 1668 - DNA, 24 bp, Homo sapiens
atcatccctgtctttgaaacccca

SEQ ID NO: 1669 - DNA, 21 bp, Homo sapiens
atctctaacagtgggagcacc

SEQ ID NO: 1670 - DNA, 24 bp, Homo sapiens
atcattcctgtcgttggtagagca

SEQ ID NO: 1671 - DNA, 21 bp, Homo sapiens
atctattacagtggaagagcc

SEQ ID NO: 1672 - DNA, 24 bp, Homo sapiens
atcaacggttacaatagtaaccca

SEQ ID NO: 1673 - DNA, 24 bp, Homo sapiens
atcatcgctgtctttggtacagca

SEQ ID NO: 1674 - DNA, 24 bp, Homo sapiens
cccatccctctctctgggacacca

SEQ ID NO: 1675 - DNA, 24 bp, Homo sapiens
atcactcctatagatgggatacca

SEQ ID NO: 1676 - DNA, 24 bp, Homo sapiens
atcatcgccatctttggtacagca

SEQ ID NO: 1677 - DNA, 24 bp, Homo sapiens
attagtggtagtggtggtagcaca

SEQ ID NO: 1678 - DNA, 24 bp, Homo sapiens
attgccagtagtggtagtaacata

SEQ ID NO: 1679 - DNA, 24 bp, Homo sapiens
atctatcctggtgactctgatacc

SEQ ID NO: 1680 - DNA, 24 bp, Homo sapiens
attagtggaagtgacggtagcaca

SEQ ID NO: 1681 - DNA, 24 bp, Homo sapiens
atctaccctgtctttggttcggca

SEQ ID NO: 1682 - DNA, 24 bp, Homo sapiens
attagttggaatagtggtgctata

SEQ ID NO: 1683 - DNA, 24 bp, Homo sapiens
attagtagtaatgggggtagcaca

SEQ ID NO: 1684 - DNA, 24 bp, Homo sapiens
atatggtatgatggaagtaataaa

SEQ ID NO: 1685 - DNA, 24 bp, Homo sapiens
attagtagtagtagtagttacata

SEQ ID NO: 1686 - DNA, 24 bp, Homo sapiens
atatggtatgatggaagtaataaa

SEQ ID NO: 1687 - DNA, 21 bp, Homo sapiens
acctattatagtgggagcacc

SEQ ID NO: 1688 - DNA, 24 bp, Homo sapiens
attagtagtaggggtgattacata

SEQ ID NO: 1689 - DNA, 114 bp, Homo sapiens
ttctacgcagactcactggagggccgattcaccgtctccagagataacgccaagaattccctttttctacaaatgaacagcctgagagccgaggacacggctgtctattactgt

SEQ ID NO: 1690 - DNA, 108 bp, Homo sapiens
accagggccactggtatcccagccaggttcagtggcagtgggtctgggacagagttcactctcaccatcagcggcctgcagtctgaagattttgcagtttattactgt

SEQ ID NO: 1691 - DNA, 114 bp, Homo sapiens
tattacgcagactcagtgaagggccgattcaccatctccagagacaacgccaagaactcagtgtttctgcaaatgaacagcctgagagtcgaggacacggctatatattattgt

SEQ ID NO: 1692 - DNA, 108 bp, Homo sapiens
actttgcaaagtggggtcccatcaaggttcagcggcagtggatctgggacagtgttcactctcacaatcagcagcctgcagcctgaagattttgcaacttattactgt

SEQ ID NO: 1693 - DNA, 114 bp, Homo sapiens
tactatgcagactccgtgaagggccgattcaccatctccagagacaattccaagaacacgctgagtctgcaattgaacagcctgaaaccagtggacacggctgtgtattactgt

SEQ ID NO: 1694 - DNA, 108 bp, Homo sapiens
attttggaaagtgggggcccatcaaggttcagcggcagtgggtctgggacagaattcactctcaccatcagcagcctgcagcctgatgattttgcaacttattactgc

SEQ ID NO: 1695 - DNA, 114 bp, Homo sapiens
tatcacgcagactctgtgaagggccgcttcaccgtctccagggacaacgccaagaggtcactgtatctacagatgaacagcctgagagccgaagacacggccgtctatttttgt

SEQ ID NO: 1696 - DNA, 108 bp, Homo sapiens
agcagggccactggcatcccagacaggttcagtggcagtgggtctgggacagacttcactctcaccatcagcagactggagcctgaagattttgcagtgtattactgt

SEQ ID NO: 1697 - DNA, 114 bp, Homo sapiens
tactatgtggactctgtgaagggccgattcaccatctccagagacaaccccaagaactcactgtatctgcagatgaacagcctgagagccgaggacacggctgtctactattgt

SEQ ID NO: 1698 - DNA, 108 bp, Homo sapiens
gcgcgggactctggggtcccagacagattcagcgccagtgggtcaggcactgatttcacactgaaaatcagcagggtggaggctgaggatgttggggtttattactgc

SEQ ID NO: 1699 - DNA, 114 bp, Homo sapiens
cactaccaggactctatgaagggccgattcatcatctccagggacaacgccaacaactcactttatctgcaaatgaacagcctgagagccgaggacacggccgtgtattactgt

SEQ ID NO: 1700 - DNA, 108 bp, Homo sapiens
actttgcagagtggggtcccatcaaggttcagcggcagtggatctgggacagaattcactctcacaatcagcagcctgcagcctgaagattttgcatcttattactgt

SEQ ID NO: 1701 - DNA, 114 bp, Homo sapiens
ttctacggagactccgtgcagggccggttcaccatctccagagacaactccaagaatatgttgtatctgcagatggacagcctgcgagccgaagacacggccaaatatttctgt

SEQ ID NO: 1702 - DNA, 108 bp, Homo sapiens
accagggccactggcatcccggccaggttcagtggcagtgggtctgggacagacttctctctcaccatcagcagcctagagactgaagattttgcagtttattactgt

SEQ ID NO: 1703 - DNA, 114 bp, Homo sapiens
tattacgcagacgccgtgaagggccgattcaccatctccagagacagatccaagaacacactatatctgcaaatgagcagcctgcgagccgaagacacggccgtatattactgt

SEQ ID NO: 1704 - DNA, 108 bp, Homo sapiens
accagggccactggcatcccggccaggttcagtggcagtgggtctgggacagacttcactctcaccatcagcagcctagagcctgaagattttgcagtttattactgt

SEQ ID NO: 1705 - DNA, 114 bp, Homo sapiens
acctacaacccgtccctcaagactcgagtcaccatagcaatagacaagtccaagaaccagttctccctggagctgaactctgtgaccgccgcggacacggccatatattattgt

SEQ ID NO: 1706 - DNA, 108 bp, Homo sapiens
agcagggccactggcatcccagacaggttcagtggcagtgggtctgggacagacttcactctcaccatcagcagactggagcctgaagattttgcagtgtatcactgt

SEQ ID NO: 1707 - DNA, 114 bp, Homo sapiens
atttacagcccgtccttccaaggtcaggtcaccatctcagccgacaagtccaactccaccgcctaccttcaatggcgcagcctgaaggcctcggacaccgccatgtattactgt

SEQ ID NO: 1708 - DNA, 108 bp, Homo sapiens
acccgggagtccggggtccctgatcgattcagtggcagcgggtctgggacaaatttcactctcaccatcagcagcctgcaggctgaagatgtggcactttattactgt

SEQ ID NO: 1709 - DNA, 114 bp, Homo sapiens
aactacaatccgtccctcaagagtcgagtcaccatatcagtagacaagtccaagaaccagttctccctgaggctgagctctgtgaccgccgcggacacggccgtgtattactgt

SEQ ID NO: 1710 - DNA, 108 bp, Homo sapiens
aacagggccactgacatcccagccaggttcagtggcagtgggtctgggacagacttcactctcaccatcagcagcctagagcctgaagattttgcagtttattactgt

SEQ ID NO: 1711 - DNA, 114 bp, Homo sapiens
acgtatgcccaggccttcacaggacggtttgtcttctccttggacacctctgtcagtacggcgtttctgcagatcaccagcctcaaggctgaggacactgccgtatattactgt

SEQ ID NO: 1712 - DNA, 108 bp, Homo sapiens
actttggaaagtggggtcccatcaaggttcagcggcagtggatctgggacagaattcactctcaccatcagcagcctgcagcctgatgattttgcaacttattactgc

SEQ ID NO: 1713 - DNA, 114 bp, Homo sapiens
acgtatgcccaggccttcacaggacggtttgtcttctcctcggacacctctgccagcacggcgtatctgcagatcaacagcctaaaggctgaggacactgccgtatattactgt

SEQ ID NO: 1714 - DNA, 108 bp, Homo sapiens; identical to SEQ ID NO: 1712

SEQ ID NO: 1715 - DNA, 114 bp, Homo sapiens
aactatgcacagaaattccagggcagagtctccgtgaccacagacacatccgcgggcacagcctacttggagttgaggagtctgacaagtgacgacacggcagtatattactgt

SEQ ID NO: 1716 - DNA, 108 bp, Homo sapiens
aagcgggactctggggtcccagacagaatcagcggcagtgggtcacacactgatttcacactgagaatcagcagggtggaggctgaggatgttggggtttattactgc

SEQ ID NO: 1717 - DNA, 114 bp, Homo sapiens
aactacaacccgtccctcaagagtcgagtcaccctatcagtagacacgtccaagaaccaggtctccctgaacgtgagctctgtgaccgccgcggacacggctgtgtattactgt

SEQ ID NO: 1718 - DNA, 108 bp, Homo sapiens
aagagggccactggcatcccagccaggttcagtggcagtgggtctgggacagacttcactctcaccatcagcagcctagagcctgaggattttgcagtttattactgt

SEQ ID NO: 1719 - DNA, 108 bp, Homo sapiens
actagggcctccggggtccctgacaggttcagtggcagtggatcaggcacagattttacactgaaaatcagcagagtggaggctgaggatgttggggtttattactgc

SEQ ID NO: 1720 - DNA, 114 bp, Homo sapiens
aactacaacccgtccctcaagagtcgagttaccatatcaatagccacctctaagacccagttctccctgaagctgagctctgtgactgccgcggacacggccgtgtattactgt

SEQ ID NO: 1721 - DNA, 108 bp, Homo sapiens
acccgggaatccggggtccctgaccgattcagtggcagcgggtctgggacagatttcactctcaccatcagcagcctgcaggctgaagatgtggcaatttattactgt

SEQ ID NO: 1722 - DNA, 114 bp, Homo sapiens
tattacaacccctccctcaagagtcgagtcaccatttcactcgacacgtccaagaaccacttctccctgaggctgagctctgtgaccgctgcggacacggccgtatattactgt

SEQ ID NO: 1723 - DNA, 108 bp, Homo sapiens
accagggccactggtatcccagccaggttcagtggcagtgggtctgggacagagttcactctcaccatcagcagcctgcagtctgaagattttgcagtttattactgt

SEQ ID NO: 1724 - DNA, 114 bp, Homo sapiens
tactacgcgcagaaattccagggcagaatcacgattaccgcggacgaatccacgagcacagcctacatggagttgagcagcttgagatctgacgacacggccgtgtattactgt

SEQ ID NO: 1725 - DNA, 108 bp, Homo sapiens
aatttggaaacaggggtcccatcaaggttcagtggaagtggatctgggacagattttactttcaccatcaccagcctgcagcctgaagatattgcaacatattactgt

SEQ ID NO: 1726 - DNA, 114 bp, Homo sapiens
aagtatggaaagaagttccagggcagagtcacgatcacctcggacacatccacgagcacagcctacatggagctgagcagcctgcgatctgacgacacggccatttattactgt

SEQ ID NO: 1727 - DNA, 108 bp, Homo sapiens
agtttagaaagtggggtcccatcaaggttcagcggcggtggatctgggacagaattcactctcaccatcagcagcctgcaggcagatgattctgcaacttattactgc

SEQ ID NO: 1728 - DNA, 114 bp, Homo sapiens
gactacaatccgtccctcaagagtcgagtcgccatatcaatagacacgttcgagaatcagttctccctgaagctgagttctgtgaccgccgcggacacggccgtctattactgt

SEQ ID NO: 1729 - DNA, 108 bp, Homo sapiens
accagggccactggtatcccagccaggttcagtggcagtgggtctgggacagacttcattctcaccatcagcagcctgcagtctgaagattttgcactttattactgt

SEQ ID NO: 1730 - DNA, 114 bp, Homo sapiens
ggctatgcggactctgtgaagggccgattcaccatctccagagacaacgccaagaactccctatatttgcaaatgaacagtctgagaactgaggacacggccttgtatttctgt

SEQ ID NO: 1731 - DNA, 108 bp, Homo sapiens
acgagggccactggtatcccagccaggttccgcggcagtgggtctgggacagacttcactctcaccatcagcagcgtgcagtctgaagattttgcagtttattactgt

SEQ ID NO: 1732 - DNA, 114 bp, Homo sapiens
tactacaacccgtccctcaagagtcgagtcaccatatcagtagacacgtccaagaaccagttctccctgaagttgagttctgtgaccgccgcagacacggccgtgtattactgt

SEQ ID NO: 1733 - DNA, 108 bp, Homo sapiens
aaccggttctctggggtcccagacagattcagtggcagtggggcagggacagatttcacactgaaaatcagcagggtggaagctgaggatgtcggggtttattactgc

SEQ ID NO: 1734 - DNA, 114 bp, Homo sapiens
aactatgcacaaaaggtccaagacagagtcaccatgaccacagaaacatccacgagcacagcctacatggagctgaggagcctgagatctgacgacacggccatgtattactgt

SEQ ID NO: 1735 - DNA, 108 bp, Homo sapiens
agcagggccactggcatcccagacaggttcagtggcggtgggtctgggacagacttcactctcaccatcagcagactggagcctgaagattttggagtgtattactgc

SEQ ID NO: 1736 - DNA, 114 bp, Homo sapiens
aactacaacccgtccctcgggagtcgagtgacgatatcactagattcgtctaagacgcagttctccctgaaactgacctctatgacggccgcggacacggccgtgtattactgt

SEQ ID NO: 1737 - DNA, 108 bp, Homo sapiens
actttgcaatcgggggtcccatcccgcttcagtggcagtggatctgggacagagttcactctcaccatcagcagcctgcaggctgaagatgttgcaacttattactgt

SEQ ID NO: 1738 - DNA, 114 bp, Homo sapiens
aaatacgcacagaaattccagggcagagtcaccattaccgcggacaaatccacgaacacagcctacatggacctgatcagcctcaaatctgaagacacggccatgtattattgt

SEQ ID NO: 1739 - DNA, 108 bp, Homo sapiens
actttagaaactggggtcccgtcgaggttcagcggcagtggatctgggacacaattcactctcaccatcaccaacctgcagcctgatgattctgcaacttattactgc

SEQ ID NO: 1740 - DNA, 114 bp, Homo sapiens
gactacaacccgtccctcaagagtcgagtaagcatatcagtagacacgtcgaagagccagttctccctgaagctgagctctgtggatgccgcagacacggccgtgtattactgt

SEQ ID NO: 1741 - DNA, 108 bp, Homo sapiens
agtttgcaaagtggagtcccatcaaggttcagtggcagtggatctgggacagacttcactctcaccatcagcagtctgcaacctgaagattttgcaacttactactgt

SEQ ID NO: 1742 - DNA, 114 bp, Homo sapiens
gactacgcacagaagtttcggggcagagtcacgataacagcggacgaattcacaagcacagcctacatggagctgagcagcctgagatctgaggacacggccgtgtattactgt

SEQ ID NO: 1743 - DNA, 108 bp, Homo sapiens
acccgggaatccggggtccctgaccgattcagtggcagcgggtctgggacagatttcactctcaccatcaccagcctgcagcctgaggatgtggcagtttattactgt

SEQ ID NO: 1744 - DNA, 114 bp, Homo sapiens
aagtacaacccctccctcgagagtcgagtcaccatgtcagtagacacgtccaagaaccagttctccctgaaattgacctctgtgaccgccgcggacacggccgtctattactgt

SEQ ID NO: 1745 - DNA, 108 bp, Homo sapiens
agtttgcaaagtgggatcccatcaaggttcagtggcagtggctctgggacagatttcactcttatcatcaccagtctgcaacctgaagatgttgcaacttactactgt

SEQ ID NO: 1746 - DNA, 114 bp, Homo sapiens
aactatgcacagatcttccaggacagagtcaccttgaccatcgacacatacacgagcacagcctacatggagtttaggagcctggtgtctgacgacacgggcatatattattgt

SEQ ID NO: 1747 - DNA, 108 bp, Homo sapiens
actttgcagtcaggggtcccatctcggttcagtggcagtggatctgggacagttttcactctcaccatcagccgcctgcagcctgaagatgttgcaacttattactgt

SEQ ID NO: 1748 - DNA, 114 bp, Homo sapiens
aactacgcacagaagttccagggcagagtcactattaccgcggacgaatccacgagcacagcctacatggagctgagcagcctgagatctgaggacacggccgtgtattactgt

SEQ ID NO: 1749 - DNA, 108 bp, Homo sapiens
aacagggccactggcatccctgacaggttcagtggcagtgggtctgggacagacttcactctcgccatcagcagactggagcctgaagattttgcagtgtattactgt

SEQ ID NO: 1750 - DNA, 114 bp, Homo sapiens
acctacgcacagaagttccagggcagactcacaatcacatcgggcttcatggagctgagcagcctgacgtctgaagacacggccatgtatttctgtgcgagaaaggatgcagga

SEQ ID NO: 1751 - DNA, 108 bp, Homo sapiens
agacgggcctccggggtccctgacaggttcagtggcagtggatcaggcacagattttgcactgaaaatcagcagagtggaggctgaggatgttggagtttattactgc

SEQ ID NO: 1752 - DNA, 114 bp, Homo sapiens
aattacgcacagaagtttcagggcagcgtcacgattaccgcggacgaatccacgagaacagcctacatggaactcagcagcctgacatctgaggacacggccatgtattactgt

SEQ ID NO: 1753 - DNA, 108 bp, Homo sapiens
accagggccactggcatcccagacaggttcagtggcagtgggtctgggacagacttcactctcaccatcagcagactggagcctgaggattttgcagtctattactgt

SEQ ID NO: 1754 - DNA, 114 bp, Homo sapiens
aagtacgcacagaagttccagggcagagtcacaatttcggcggacgagtccacgaggatagtccagatggagctgagcagcctgagatctgacgacacggccatttattactgt

SEQ ID NO: 1755 - DNA, 108 bp, Homo sapiens
tccagggccactggtatcccagccaggttcagtggcagtgggtctgggacagagttcactctcagcatcagcagcctacagcctgaagattttgcagtttattactgt

SEQ ID NO: 1756 - DNA, 114 bp, Homo sapiens
tactacgcagactccgtgaagggccggttcaccgtctccagagacaattccaagagcacactgtatctacaaatgaacagcctgagacccgaggacacggccatatattactgt

SEQ ID NO: 1757 - DNA, 108 bp, Homo sapiens
aatcgggcctccggggtccctgacaggttcagtggcagtggatcaggcacagattttacactgaaaatcagcagagtggaggctgaggatgttggcgtttattactgc

SEQ ID NO: 1758 - DNA, 114 bp, Homo sapiens
tactacgcagactcagtgaagggccggttcaccatctccagagacgacgccaagaactcactatttctgcacatgaacagcctgagagccgaggacacggctgtgtattactgt

SEQ ID NO: 1759 - DNA, 108 bp, Homo sapiens
accagggccgctggcatcccagacaggttcagtggcagtgggtctgggacagacttcactctcaccatcagcagactggagcctgaagattttgcagtgtattactgt

SEQ ID NO: 1760 - DNA, 114 bp, Homo sapiens
agatacggcccgtccttccaaggccaggtcaccatctcagccgacaagtccgtcacaaccgcctacttgcgctggagcagtgtgcaggcctcggacagcgccatatattactgt

SEQ ID NO: 1761 - DNA, 108 bp, Homo sapiens
agcaggcccactggcatcccagacagattcagtggcagtgggtctgggacacacttcactctcaccatcaccagactggagcctgaagattttgcagtatattactgt

SEQ ID NO: 1762 - DNA, 114 bp, Homo sapiens
tactacgcggactccgtgaagggccgattcaccatctccagagacaattccaacaacacggtgtatctgcaaatgaacgggctgagagtcgaggacacggccgtatattactgt

SEQ ID NO: 1763 - DNA, 108 bp, Homo sapiens
acccgggattccggggtccctgaccgattcagtggcagcgggtctggggcagatttcactctcaccattaccagcctgcaggctgaagatgtggcagtctattactgt

SEQ ID NO: 1764 - DNA, 114 bp, Homo sapiens
aactacgcacagaacttccagggcagactcatgattaccgcggacgaatccccgagcacagcctacatggagctgagcagcctcagatctgaggacacggccgtctattattgt

SEQ ID NO: 1765 - DNA, 108 bp, Homo sapiens
aacagggcctctggcatcccagccaggttcagtggcagtgggtctgggacagacttcactctcaccatcagcagcctagagcctgaagattttgcagtttattactgt

SEQ ID NO: 1766 - DNA, 114 bp, Homo sapiens
ggctatgcagactctgtggagggccgattcaccatctccagagacaacgccaagaactccctctatctgcaaatgaacaatctgagagttgaggacacggccttgtattactgt

SEQ ID NO: 1767 - DNA, 108 bp, Homo sapiens
accagggccactggtgtcccagccaggttcagtggcagtgggtctgggacagagttcactctcaccatcagcagcctgcagtctgaagattttgcagtttattactgt

SEQ ID NO: 1768 - DNA, 114 bp, Homo sapiens
tactacgcagactcagtgaagggcagattcaccatctccagagacaattccaagaacacgctgtatcttcaaatgagcagtctgagagctgaggacacggctgtgtattactgt

SEQ ID NO: 1769 - DNA, 108 bp, Homo sapiens
agtttgcaaagtggggtcccatcaaggttcagtggcagtggatctgggacagatttcactctcaccatcagcagtctgcaacctgaagattttgcaacttactactgt

SEQ ID NO: 1770 - DNA, 114 bp, Homo sapiens
tactatgcagactccgtgaagggccgattcaccatctccagagacaattccaagaacacgctgtatctgcaaatgaacagcctgagagccgaggacacggctgtgtattactgt

SEQ ID NO: 1771 - DNA, 114 bp, Homo sapiens
tactacgcagactcagtgaagggccgattcaccatctccagagacaacgccaagaactcactgtatctgcaaatgaacagcctgagagccgaggacacggctgtgtattactgt

SEQ ID NO: 1772 - DNA, 108 bp, Homo sapiens; identical to SEQ ID NO: 1723

SEQ ID NO: 1773 - DNA, 114 bp, Homo sapiens; identical to SEQ ID NO: 1770

SEQ ID NO: 1774 - DNA, 108 bp, Homo sapiens; identical to SEQ ID NO: 1769

SEQ ID NO: 1775 - DNA, 114 bp, Homo sapiens
tacgccaatccgtccctcaggagtcgaatcaccatgtcactagacacgtccaagaaccagttctccctgaaagtcagctctgtgaccgccgtggacacggccgtctattactgt

SEQ ID NO: 1776 - DNA, 108 bp, Homo sapiens
actttacaaagtggggtcccatcaaggttcagcggcagtggatctgggacagaattcacgctcaccatcaacagcctgcagcctgatgattttgcaacttattactgc

SEQ ID NO: 1777 - DNA, 108 bp, Homo sapiens
accagggccactggtgtcccagccaggttcagtggcagtgggtctgggacagaattcactctcagcatcagcagcctgcagtctgaagattttgcagtttattactgt

SEQ ID NO: 1778 - DNA, 114 bp, Homo sapiens
tactacgcagagtcagtggagggccgattcaccatctccagagacaacgccaagaactcactgtatctggaaatgaacagcctgagagccgaggacacggctgtgtattactgt

SEQ ID NO: 1779 - DNA, 108 bp, Homo sapiens
gatttggaaacaggggtcccatcaaggttcagtggaagtggatctgggacagattttactttcaccatcagcaggctgcagcctgaagacactgcaacatattactgt

SEQ ID NO: 1780 - DNA, 42 bp, Homo sapiens
gcgagagaccgctacgctgactcgaattattactttgactcc

SEQ ID NO: 1781 - DNA, 30 bp, Homo sapiens
cagcagtatagtcagtggcctccgctcact

SEQ ID NO: 1782 - DNA, 54 bp, Homo sapiens
gtgagagataatagtggttattacgaaaattaccactactacggcatggacgtc

SEQ ID NO: 1783 - DNA, 27 bp, Homo sapiens
caacagcttaataattatccgtacact

SEQ ID NO: 1784 - DNA, 45 bp, Homo sapiens
gcgaaagccggattacagcgcttctccccccacttcatggatgtc

SEQ ID NO: 1785 - DNA, 30 bp, Homo sapiens
caacagtatcatagtcattcaaagctcact

SEQ ID NO: 1786 - DNA, 36 bp, Homo sapiens
gtgagagatctcgtctgggtccagttacctgactac

SEQ ID NO: 1787 - DNA, 27 bp, Homo sapiens
cagcagtatgggagctcaccgacaacg

SEQ ID NO: 1788 - DNA, 30 bp, Homo sapiens
gcgagagatttcgaccgtggtgcagagcac

SEQ ID NO: 1789 - DNA, 27 bp, Homo sapiens
ttgcaaggaacacactggcctcgaacg

SEQ ID NO: 1790 - DNA, 57 bp, Homo sapiens
gcgagatactacttggcggggaattgtcgtacttccaactgttatgtctttgactac

SEQ ID NO: 1791 - DNA, 27 bp, Homo sapiens
caacaacttaatagtttccctcccact

SEQ ID NO: 1792 - DNA, 63 bp, Homo sapiens
gcgaagcatgtaactggttattatctaagtggtggagaggggggtggaggaacgttggacgtc

SEQ ID NO: 1793 - DNA, 27 bp, Homo sapiens
cagcagcggatcaactggccgctcact

SEQ ID NO: 1794 - DNA, 21 bp, Homo sapiens
gtaaaagatcaatgggattac

SEQ ID NO: 1795 - DNA, 27 bp, Homo sapiens
cagcaacgtaacaactggcctctcact

SEQ ID NO: 1796 - DNA, 39 bp, Homo sapiens
gttgccgtggcttttcgcgcctacgccctttttgacgac

SEQ ID NO: 1797 - DNA, 27 bp, Homo sapiens
cagcagtatggtagttcacctaggacg

SEQ ID NO: 1798 - DNA, 51 bp, Homo sapiens
gcgagacatcaggtttcagccggctacactggttattaccactttgactac

SEQ ID NO: 1799 - DNA, 27 bp, Homo sapiens
cagcaatattatagtagtcccctcact

SEQ ID NO: 1800 - DNA, 42 bp, Homo sapiens
gcgagagagcggaatagagtatactactacggtatggacgtc

SEQ ID NO: 1801 - DNA, 18 bp, Homo sapiens
cagcagcgtagaaacact

SEQ ID NO: 1802 - DNA, 42 bp, Homo sapiens
gcgacaaggggacccgtggtcctaggtgaagcccttgcctac

SEQ ID NO: 1803 - DNA, 24 bp, Homo sapiens
caacagtataataattattctggg

SEQ ID NO: 1804 - DNA, 42 bp, Homo sapiens
gcgacaaggggacccttagtcctaggtgaagcccttgactcc

SEQ ID NO: 1805 - DNA, 24 bp, Homo sapiens
caacagtataatagttattctggg

SEQ ID NO: 1806 - DNA, 48 bp, Homo sapiens
gcgagagatgagggacaatatagaggtaattgggaccactttgactac

SEQ ID NO: 1807 - DNA, 27 bp, Homo sapiens
atgcaggctacacactggcctaggacg

SEQ ID NO: 1808 - DNA, 54 bp, Homo sapiens
gcgagaggccgaggtggctacgccacctactactactactactacgtggacgtc

SEQ ID NO: 1809 - DNA, 24 bp, Homo sapiens
cagcagcgtagcaactggctcact

SEQ ID NO: 1810 - DNA, 27 bp, Homo sapiens
atgcaagctctacaaactcctctaact

SEQ ID NO: 1811 - DNA, 42 bp, Homo sapiens
gcgagagaccagaatgactacggtgaagatcctttagatgtc

SEQ ID NO: 1812 - DNA, 30 bp, Homo sapiens
cagcaatattgtggtactcccttgtacact

SEQ ID NO: 1813 - DNA, 66 bp, Homo sapiens
gcgagacaagttttttatgacaacgatgaccacgacgggttgggctactactacggtctggacgtc

SEQ ID NO: 1814 - DNA, 24 bp, Homo sapiens
cagcagtataataactggcccact

SEQ ID NO: 1815 - DNA, 57 bp, Homo sapiens
gggagagcgaggcggcaggtgacactggataactccttctcataccctatggacgtc

SEQ ID NO: 1816 - DNA, 27 bp, Homo sapiens
caacactatgataatgtccctcccact

SEQ ID NO: 1817 - DNA, 48 bp, Homo sapiens
gcgaccagtgccggcgggatagtgaactacttcctcctttttgatatt

SEQ ID NO: 1818 - DNA, 27 bp, Homo sapiens
caacactataatacttattcggggacg

SEQ ID NO: 1819 - DNA, 57 bp, Homo sapiens
gcgagagtgaacatatatctcgtcaccgtggaggagtatcactacggaatggacgtg

SEQ ID NO: 1820 - DNA, 33 bp, Homo sapiens
cagcactacaataggtggcctttggggttcact

SEQ ID NO: 1821 - DNA, 36 bp, Homo sapiens
gcaagaagtaatggtgcggggagttactctgaatcc

SEQ ID NO: 1822 - DNA, 24 bp, Homo sapiens
cagcagtataataactggccccat

SEQ ID NO: 1823 - DNA, 42 bp, Homo sapiens
gcgagaggtagaggggctacggtgactactcactttgactac

SEQ ID NO: 1824 - DNA, 30 bp, Homo sapiens
atgcaagctacacaatttccctcgatcacc

SEQ ID NO: 1825 - DNA, 48 bp, Homo sapiens
gcgagaatgggtattgtagtcgcaccagctgtggggtctcttgactac

SEQ ID NO: 1826 - DNA, 27 bp, Homo sapiens
cagcagtatggtacctcaccgtggacg

SEQ ID NO: 1827 - DNA, 42 bp, Homo sapiens
gcgagagatcgtcatgactacggtgaagatccctttgatatc

SEQ ID NO: 1828 - DNA, 27 bp, Homo sapiens
caaaagtataacagtgtcccgctcact

SEQ ID NO: 1829 - DNA, 48 bp, Homo sapiens
gcgaccagtgctggcgggattgtaaattattatctcagttttaatatc

SEQ ID NO: 1830 - DNA, 27 bp, Homo sapiens
caacaatacagtacttattcggggaca

SEQ ID NO: 1831 - DNA, 69 bp, Homo sapiens
gccagagattcacgacttctggagtggtttacggtcgatagcccgtatgactactacgctatggacgtc

SEQ ID NO: 1832 - DNA, 27 bp, Homo sapiens
caacagacttacagtccccctaggacg

SEQ ID NO: 1833 - DNA, 39 bp, Homo sapiens
gcgagagataggagcgacgaagactacgatattggctac

SEQ ID NO: 1834 - DNA, 27 bp, Homo sapiens
cagcaatattatagtacttcgtggacg

SEQ ID NO: 1835 - DNA, 45 bp, Homo sapiens
gcgagagataggacgggggcgggggacaaaaatgcttttgatgtc

SEQ ID NO: 1836 - DNA, 27 bp, Homo sapiens
caacagagttacgatacccctcagacg

SEQ ID NO: 1837 - DNA, 63 bp, Homo sapiens
gcgagaggagcgagttcaacgggaacgatgggattgcgcgggaaaaatgatgcctttgatatc

SEQ ID NO: 1838 - DNA, 27 bp, Homo sapiens
caagtgtatatcagtgccccgtacact

SEQ ID NO: 1839 - DNA, 42 bp, Homo sapiens
gcgaggggcccttattattatggtaatagccaccttgacttc

SEQ ID NO: 1840 - DNA, 27 bp, Homo sapiens
cagcagtatggtacctcacctcggacg

SEQ ID NO: 1841 - DNA, 24 bp, Homo sapiens
agtgcctataaaagttttgatgtc

SEQ ID NO: 1842 - DNA, 27 bp, Homo sapiens
atgcaatctctacaaactcctccgacg

SEQ ID NO: 1843 - DNA, 36 bp, Homo sapiens
gcgagagatggagggtggctacgaacccttgactcc

SEQ ID NO: 1844 - DNA, 33 bp, Homo sapiens
cagtactatgttagttcaccgaggagattcact

SEQ ID NO: 1845 - DNA, 42 bp, Homo sapiens
gcgagctccagtgggagttactacggcgactactttgactac

SEQ ID NO: 1846 - DNA, 27 bp, Homo sapiens
cagcagtataataactggcctcggacg

SEQ ID NO: 1847 - DNA, 45 bp, Homo sapiens
gcgaggtcaacgtgtggcggtagttgctactacaggctcgacccc

SEQ ID NO: 1848 - DNA, 27 bp, Homo sapiens
atgcaacctctacaaactccattcact

SEQ ID NO: 1849 - DNA, 39 bp, Homo sapiens
gcgagaagtccgggtatagccgtgggacttattgactac

SEQ ID NO: 1850 - DNA, 27 bp, Homo sapiens
cagcagtatggcaggtcacctcggacg

SEQ ID NO: 1851 - DNA, 69 bp, Homo sapiens
gcgagactgggctgtggtacaaccgactgctcccctacttggccctactactactacggtctggacgtc

SEQ ID NO: 1852 - DNA, 24 bp, Homo sapiens
cagcagtatggtcgctctcccacc

SEQ ID NO: 1853 - DNA, 54 bp, Homo sapiens
gcgaaaggcctcgcatattgtagttttggtagctgcccttaccctcttgactat

SEQ ID NO: 1854 - DNA, 27 bp, Homo sapiens
cagcaatatgttacttctcctcggact

SEQ ID NO: 1855 - DNA, 69 bp, Homo sapiens
gcgagaggaaggactagtgggagccaagaccgactcccacttctctggggtctgagtggttttgatatc

SEQ ID NO: 1856 - DNA, 24 bp, Homo sapiens
cagcagagtagcaactgggtcact

SEQ ID NO: 1857 - DNA, 39 bp, Homo sapiens
acaaaagctcacagtgcgacccaccagggctttgactac

SEQ ID NO: 1858 - DNA, 30 bp, Homo sapiens
caacagtataatggctggcccctgtacact

SEQ ID NO: 1859 - DNA, 60 bp, Homo sapiens
gtgaatgggggtcgggcttttggagtggttattaaatactactactacggtatggacgtc

SEQ ID NO: 1860 - DNA, 27 bp, Homo sapiens
caacagagttacagtactcccatcacc

SEQ ID NO: 1861 - DNA, 39 bp, Homo sapiens
gcgagagatagtgagggcagtggctggtactttgactac

SEQ ID NO: 1862 - DNA, 54 bp, Homo sapiens
gcgagacgaccttccggatttttggaggggtactactactactacatggacgtc

SEQ ID NO: 1863 - DNA, 27 bp, Homo sapiens
cagcagtataataactggcccctcact

SEQ ID NO: 1864 - DNA, 39 bp, Homo sapiens; identical to SEQ ID NO: 1861

SEQ ID NO: 1865 - DNA, 27 bp, Homo sapiens
caacagagttacagtactcccatcacc

SEQ ID NO: 1866 - DNA, 33 bp, Homo sapiens
gcgctaggcctgaccagtggctggattgactac

SEQ ID NO: 1867 - DNA, 24 bp, Homo sapiens
caacaatataatagttttcggaca

SEQ ID NO: 1868 - DNA, 30 bp, Homo sapiens
caacactataatgactggccttcgtgcagt

SEQ ID NO: 1869 - DNA, 54 bp, Homo sapiens
gcgagagctgggctgggtacagtggatttaaggtgggggggggccttcgaccac

SEQ ID NO: 1870 - DNA, 27 bp, Homo sapiens
caacagtatgacgatctcccgtatact

SEQ ID NO: 1871 - DNA, 48 bp, Homo sapiens
tgtgcgagagaccgctacgctgactcgaattattactttgactcctgg

SEQ ID NO: 1872 - DNA, 36 bp, Homo sapiens
tgtcagcagtatagtcagtggcctccgctcactttc

SEQ ID NO: 1873 - DNA, 60 bp, Homo sapiens
tgtgtgagagataatagtggttattacgaaaattaccactactacggcatggacgtctgg

SEQ ID NO: 1874 - DNA, 33 bp, Homo sapiens
tgtcaacagcttaataattatccgtacactttt

SEQ ID NO: 1875 - DNA, 51 bp, Homo sapiens
tgtgcgaaagccggattacagcgcttctccccccacttcatggatgtctgg

SEQ ID NO: 1876 - DNA, 36 bp, Homo sapiens
tgccaacagtatcatagtcattcaaagctcactttc

SEQ ID NO: 1877 - DNA, 42 bp, Homo sapiens
tgtgtgagagatctcgtctgggtccagttacctgactactgg

SEQ ID NO: 1878 - DNA, 33 bp, Homo sapiens
tgtcagcagtatgggagctcaccgacaacgttc

SEQ ID NO: 1879 - DNA, 36 bp, Homo sapiens
tgtgcgagagatttcgaccgtggtgcagagcactgg

SEQ ID NO: 1880 - DNA, 33 bp, Homo sapiens
tgcttgcaaggaacacactggcctcgaacgttc

SEQ ID NO: 1881 - DNA, 63 bp, Homo sapiens
tgtgcgagatactacttggcggggaattgtcgtacttccaactgttatgtctttgactactgg

SEQ ID NO: 1882 - DNA, 33 bp, Homo sapiens
tgtcaacaacttaatagtttccctcccactttt

SEQ ID NO: 1883 - DNA, 69 bp, Homo sapiens
tgtgcgaagcatgtaactggttattatctaagtggtggagaggggggtggaggaacgttggacgtctgg

SEQ ID NO: 1884 - DNA, 33 bp, Homo sapiens
tgtcagcagcggatcaactggccgctcactttc

SEQ ID NO: 1885 - DNA, 27 bp, Homo sapiens
tgtgtaaaagatcaatgggattactgg

SEQ ID NO: 1886 - DNA, 33 bp, Homo sapiens
tgtcagcaacgtaacaactggcctctcactttc

SEQ ID NO: 1887 - DNA, 45 bp, Homo sapiens
tgtgttgccgtggcttttcgcgcctacgccctttttgacgactgg

SEQ ID NO: 1888 - DNA, 33 bp, Homo sapiens
tgtcagcagtatggtagttcacctaggacgttc

SEQ ID NO: 1889 - DNA, 57 bp, Homo sapiens
tgtgcgagacatcaggtttcagccggctacactggttattaccactttgactactgg

SEQ ID NO: 1890 - DNA, 33 bp, Homo sapiens
tgtcagcaatattatagtagtcccctcactttc

SEQ ID NO: 1891 - DNA, 48 bp, Homo sapiens
tgtgcgagagagcggaatagagtatactactacggtatggacgtctgg

SEQ ID NO: 1892 - DNA, 24 bp, Homo sapiens
tgtcagcagcgtagaaacactttc

SEQ ID NO: 1893 - DNA, 48 bp, Homo sapiens
tgtgcgacaaggggacccgtggtcctaggtgaagcccttgcctactgg

SEQ ID NO: 1894 - DNA, 30 bp, Homo sapiens
tgccaacagtataataattattctgggttc

SEQ ID NO: 1895 - DNA, 48 bp, Homo sapiens
tgtgcgacaaggggacccttagtcctaggtgaagcccttgactcctgg

SEQ ID NO: 1896 - DNA, 30 bp, Homo sapiens
tgccaacagtataatagttattctgggttc

SEQ ID NO: 1897 - DNA, 54 bp, Homo sapiens
tgtgcgagagatgagggacaatatagaggtaattgggaccactttgactactgg

SEQ ID NO: 1898 - DNA, 33 bp, Homo sapiens
tgcatgcaggctacacactggcctaggacgttc

SEQ ID NO: 1899 - DNA, 60 bp, Homo sapiens
tgtgcgagaggccgaggtggctacgccacctactactactactactacgtggacgtctgg

SEQ ID NO: 1900 - DNA, 30 bp, Homo sapiens
tgtcagcagcgtagcaactggctcactttc

SEQ ID NO: 1901 - DNA, 33 bp, Homo sapiens
tgcatgcaagctctacaaactcctctaactttt

SEQ ID NO: 1902 - DNA, 48 bp, Homo sapiens
tgtgcgagagaccagaatgactacggtgaagatcctttagatgtctgg

SEQ ID NO: 1903 - DNA, 36 bp, Homo sapiens
tgtcagcaatattgtggtactcccttgtacactttt

SEQ ID NO: 1904 - DNA, 72 bp, Homo sapiens
tgtgcgagacaagttttttatgacaacgatgaccacgacgggttgggctactactacggtctggacgtctgg

SEQ ID NO: 1905 - DNA, 30 bp, Homo sapiens
tgtcagcagtataataactggcccactttc

SEQ ID NO: 1906 - DNA, 63 bp, Homo sapiens
tgtgggagagcgaggcggcaggtgacactggataactccttctcataccctatggacgtctgg

SEQ ID NO: 1907 - DNA, 33 bp, Homo sapiens
tgtcaacactatgataatgtccctcccactttc

SEQ ID NO: 1908 - DNA, 54 bp, Homo sapiens
tgtgcgaccagtgccggcgggatagtgaactacttcctcctttttgatatttgg

SEQ ID NO: 1909 - DNA, 33 bp, Homo sapiens
tgccaacactataatacttattcggggacgttc

SEQ ID NO: 1910 - DNA, 63 bp, Homo sapiens
tgtgcgagagtgaacatatatctcgtcaccgtggaggagtatcactacggaatggacgtgtgg

SEQ ID NO: 1911 - DNA, 39 bp, Homo sapiens
tgtcagcactacaataggtggcctttggggttcactttc

SEQ ID NO: 1912 - DNA, 42 bp, Homo sapiens
tgtgcaagaagtaatggtgcggggagttactctgaatcctgg

SEQ ID NO: 1913 - DNA, 30 bp, Homo sapiens
tgtcagcagtataataactggccccatttc

SEQ ID NO: 1914 - DNA, 48 bp, Homo sapiens
tgtgcgagaggtagaggggctacggtgactactcactttgactactgg

SEQ ID NO: 1915 - DNA, 36 bp, Homo sapiens
tgcatgcaagctacacaatttccctcgatcaccttc

SEQ ID NO: 1916 - DNA, 54 bp, Homo sapiens
tgtgcgagaatgggtattgtagtcgcaccagctgtggggtctcttgactactgg

SEQ ID NO: 1917 - DNA, 33 bp, Homo sapiens
tgccagcagtatggtacctcaccgtggacgttc

SEQ ID NO: 1918 - DNA, 48 bp, Homo sapiens
tgtgcgagagatcgtcatgactacggtgaagatccctttgatatctgg

SEQ ID NO: 1919 - DNA, 33 bp, Homo sapiens
tgtcaaaagtataacagtgtcccgctcactttc

SEQ ID NO: 1920 - DNA, 54 bp, Homo sapiens
tgtgcgaccagtgctggcgggattgtaaattattatctcagttttaatatctgg

SEQ ID NO: 1921 - DNA, 33 bp, Homo sapiens
tgccaacaatacagtacttattcggggacattc

SEQ ID NO: 1922 - DNA, 75 bp, Homo sapiens
tgtgccagagattcacgacttctggagtggtttacggtcgatagcccgtatgactactacgctatggacgtctgg

SEQ ID NO: 1923 - DNA, 33 bp, Homo sapiens
tgtcaacagacttacagtccccctaggacgttc

SEQ ID NO: 1924 - DNA, 45 bp, Homo sapiens
tgtgcgagagataggagcgacgaagactacgatattggctactgg

SEQ ID NO: 1925 - DNA, 33 bp, Homo sapiens
tgtcagcaatattatagtacttcgtggacgttc

SEQ ID NO: 1926 - DNA, 51 bp, Homo sapiens
tgtgcgagagataggacgggggcgggggacaaaaatgcttttgatgtctgg

SEQ ID NO: 1927 - DNA, 33 bp, Homo sapiens
tgtcaacagagttacgatacccctcagacgttc

SEQ ID NO: 1928 - DNA, 69 bp, Homo sapiens
tgtgcgagaggagcgagttcaacgggaacgatgggattgcgcgggaaaaatgatgcctttgatatctgg

SEQ ID NO: 1929 - DNA, 33 bp, Homo sapiens
tgtcaagtgtatatcagtgccccgtacactttt

SEQ ID NO: 1930 - DNA, 48 bp, Homo sapiens
tgtgcgaggggcccttattattatggtaatagccaccttgacttctgg

SEQ ID NO: 1931 - DNA, 33 bp, Homo sapiens
tgtcagcagtatggtacctcacctcggacgttc

SEQ ID NO: 1932 - DNA, 30 bp, Homo sapiens
ggaagtgcctataaaagttttgatgtctgg

SEQ ID NO: 1933 - DNA, 33 bp, Homo sapiens
tgcatgcaatctctacaaactcctccgacgttc

SEQ ID NO: 1934 - DNA, 42 bp, Homo sapiens
tgtgcgagagatggagggtggctacgaacccttgactcctgg

SEQ ID NO: 1935 - DNA, 39 bp, Homo sapiens
tgtcagtactatgttagttcaccgaggagattcactttc

SEQ ID NO: 1936 - DNA, 48 bp, Homo sapiens
tgtgcgagctccagtgggagttactacggcgactactttgactactgg

SEQ ID NO: 1937 - DNA, 33 bp, Homo sapiens
tgtcagcagtataataactggcctcggacgttc

SEQ ID NO: 1938 - DNA, 51 bp, Homo sapiens
tgtgcgaggtcaacgtgtggcggtagttgctactacaggctcgacccctgg

SEQ ID NO: 1939 - DNA, 33 bp, Homo sapiens
tgcatgcaacctctacaaactccattcactttc

SEQ ID NO: 1940 - DNA, 45 bp, Homo sapiens
tgtgcgagaagtccgggtatagccgtgggacttattgactactgg

SEQ ID NO: 1941 - DNA, 33 bp, Homo sapiens
tgtcagcagtatggcaggtcacctcggacgttc

SEQ ID NO: 1942 - DNA, 75 bp, Homo sapiens
tgtgcgagactgggctgtggtacaaccgactgctcccctacttggccctactactactacggtctggacgtctgg

SEQ ID NO: 1943 - DNA, 30 bp, Homo sapiens
tgtcagcagtatggtcgctctcccaccttc

SEQ ID NO: 1944 - DNA, 60 bp, Homo sapiens
tgtgcgaaaggcctcgcatattgtagttttggtagctgcccttaccctcttgactattgg

SEQ ID NO: 1945 - DNA, 33 bp, Homo sapiens
tgtcagcaatatgttacttctcctcggactttt

SEQ ID NO: 1946 - DNA, 75 bp, Homo sapiens
tgtgcgagaggaaggactagtgggagccaagaccgactcccacttctctggggtctgagtggttttgatatctgg

SEQ ID NO: 1947 - DNA, 30 bp, Homo sapiens
tgtcagcagagtagcaactgggtcactttc

SEQ ID NO: 1948 - DNA, 45 bp, Homo sapiens
tgtacaaaagctcacagtgcgacccaccagggctttgactactgg

SEQ ID NO: 1949 - DNA, 36 bp, Homo sapiens
tgtcaacagtataatggctggcccctgtacactttt

SEQ ID NO: 1950 - DNA, 66 bp, Homo sapiens
tgtgtgaatgggggtcgggcttttggagtggttattaaatactactactacggtatggacgtctgg

SEQ ID NO: 1951 - DNA, 33 bp, Homo sapiens
tgtcaacagagttacagtactcccatcaccttc

SEQ ID NO: 1952 - DNA, 45 bp, Homo sapiens
tgtgcgagagatagtgagggcagtggctggtactttgactactgg

SEQ ID NO: 1953 - DNA, 60 bp, Homo sapiens
tgtgcgagacgaccttccggatttttggaggggtactactactactacatggacgtctgg

SEQ ID NO: 1954 - DNA, 33 bp, Homo sapiens
tgtcagcagtataataactggcccctcactttc

SEQ ID NO: 1955 - DNA, 45 bp, Homo sapiens; identical to SEQ ID NO: 1952

SEQ ID NO: 1956 - DNA, 33 bp, Homo sapiens; identical to SEQ ID NO: 1951

SEQ ID NO: 1957 - DNA, 39 bp, Homo sapiens
tgtgcgctaggcctgaccagtggctggattgactactgg

SEQ ID NO: 1958 - DNA, 30 bp, Homo sapiens
tgccaacaatataatagttttcggacattc

SEQ ID NO: 1959 - DNA, 36 bp, Homo sapiens
tgtcaacactataatgactggccttcgtgcagtttt

SEQ ID NO: 1960 - DNA, 60 bp, Homo sapiens
tgtgcgagagctgggctgggtacagtggatttaaggtgggggggggccttcgaccactgg

SEQ ID NO: 1961 - DNA, 33 bp, Homo sapiens
tgtcaacagtatgacgatctcccgtatactttt

SEQ ID NO: 1962 - DNA, 11 bp, Homo sapiens
tgtgcgagaga

SEQ ID NO: 1963 - DNA, 26 bp, Homo sapiens
tgtcagcagtatagtcagtggcctcc

SEQ ID NO: 1964 - DNA, 11 bp, Homo sapiens
tgtgtgagaga

SEQ ID NO: 1965 - DNA, 16 bp, Homo sapiens
tgtcaacagcttaata

SEQ ID NO: 1966 - DNA, 10 bp, Homo sapiens
tgtgcgaaag

SEQ ID NO: 1967 - DNA, 23 bp, Homo sapiens
tgccaacagtatcatagtcattc

SEQ ID NO: 1968 - DNA, 11 bp, Homo sapiens
tgtgtgagaga

SEQ ID NO: 1969 - DNA, 23 bp, Homo sapiens
tgtcagcagtatgggagctcacc

SEQ ID NO: 1970 - DNA, 11 bp, Homo sapiens
tgtgcgagaga

SEQ ID NO: 1971 - DNA, 25 bp, Homo sapiens
tgcttgcaaggaacacactggcctc

SEQ ID NO: 1972 - DNA, 16 bp, Homo sapiens
tgtcaacaacttaata

SEQ ID NO: 1973 - DNA, 23 bp, Homo sapiens
tgtcagcagcggatcaactggcc

SEQ ID NO: 1974 - DNA, 11 bp, Homo sapiens
tgtgtaaaaga

SEQ ID NO: 1975 - DNA, 25 bp, Homo sapiens
tgtcagcaacgtaacaactggcctc

SEQ ID NO: 1976 - DNA, 24 bp, Homo sapiens
tgtcagcagtatggtagttcacct

SEQ ID NO: 1977 - DNA, 11 bp, Homo sapiens
tgtgcgagaca

SEQ ID NO: 1978 - DNA, 23 bp, Homo sapiens
tgtcagcaatattatagtagtcc

SEQ ID NO: 1979 - DNA, 11 bp, Homo sapiens
tgtgcgagaga

SEQ ID NO: 1980 - DNA, 18 bp, Homo sapiens
tgtcagcagcgtagaaac

SEQ ID NO: 1981 - DNA, 24 bp, Homo sapiens
tgccaacagtataataattattct

SEQ ID NO: 1982 - DNA, 24 bp, Homo sapiens
tgccaacagtataatagttattct

SEQ ID NO: 1983 - DNA, 11 bp, Homo sapiens
tgtgcgagaga

SEQ ID NO: 1984 - DNA, 24 bp, Homo sapiens
tgcatgcaggctacacactggcct

SEQ ID NO: 1985 - DNA, 11 bp, Homo sapiens
tgtgcgagagg

SEQ ID NO: 1986 - DNA, 22 bp, Homo sapiens
tgtcagcagcgtagcaactggc

SEQ ID NO: 1987 - DNA, 25 bp, Homo sapiens
tgcatgcaagctctacaaactcctc

SEQ ID NO: 1988 - DNA, 11 bp, Homo sapiens
tgtgcgagaga

SEQ ID NO: 1989 - DNA, 23 bp, Homo sapiens
tgtcagcaatattgtggtactcc

SEQ ID NO: 1990 - DNA, 23 bp, Homo sapiens
tgtcagcagtataataactggcc

SEQ ID NO: 1991 - DNA, 10 bp, Homo sapiens
tgtgggagag

SEQ ID NO: 1992 - DNA, 26 bp, Homo sapiens
tgtcaacactatgataatgtccctcc

SEQ ID NO: 1993 - DNA, 23 bp, Homo sapiens
tgccaacactataatacttattc

SEQ ID NO: 1994 - DNA, 10 bp, Homo sapiens
tgtgcgagag

SEQ ID NO: 1995 - DNA, 24 bp, Homo sapiens
tgtcagcactacaataggtggcct

SEQ ID NO: 1996 - DNA, 23 bp, Homo sapiens
tgtcagcagtataataactggcc

SEQ ID NO: 1997 - DNA, 23 bp, Homo sapiens
tgcatgcaagctacacaatttcc

SEQ ID NO: 1998 - DNA, 23 bp, Homo sapiens
tgccagcagtatggtacctcacc

SEQ ID NO: 1999 - DNA, 11 bp, Homo sapiens
tgtgcgagaga

SEQ ID NO: 2000 - DNA, 23 bp, Homo sapiens
tgtcaaaagtataacagtgtccc

SEQ ID NO: 2001 - DNA, 23 bp, Homo sapiens
tgccaacaatacagtacttattc

SEQ ID NO: 2002 - DNA, 11 bp, Homo sapiens
tgtgccagaga

SEQ ID NO: 2003 - DNA, 24 bp, Homo sapiens
tgtcaacagacttacagtccccct

SEQ ID NO: 2004 - DNA, 11 bp, Homo sapiens
tgtgcgagaga

SEQ ID NO: 2005 - DNA, 21 bp, Homo sapiens
tgtcagcaatattatagtact

SEQ ID NO: 2006 - DNA, 11 bp, Homo sapiens
tgtgcgagaga

SEQ ID NO: 2007 - DNA, 25 bp, Homo sapiens
tgtcaacagagttacgatacccctc

SEQ ID NO: 2008 - DNA, 10 bp, Homo sapiens
tgtgcgagag

SEQ ID NO: 2009 - DNA, 23 bp, Homo sapiens
tgtcaagtgtatatcagtgcccc

SEQ ID NO: 2010 - DNA, 25 bp, Homo sapiens
tgtcagcagtatggtacctcacctc

SEQ ID NO: 2011 - DNA, 26 bp, Homo sapiens
tgcatgcaatctctacaaactcctcc

SEQ ID NO: 2012 - DNA, 11 bp, Homo sapiens
tgtgcgagaga

SEQ ID NO: 2013 - DNA, 23 bp, Homo sapiens
tgtcagtactatgttagttcacc

SEQ ID NO: 2014 - DNA, 25 bp, Homo sapiens
tgtcagcagtataataactggcctc

SEQ ID NO: 2015 - DNA, 23 bp, Homo sapiens
tgcatgcaacctctacaaactcc

SEQ ID NO: 2016 - DNA, 25 bp, Homo sapiens
tgtcagcagtatggcaggtcacctc

SEQ ID NO: 2017 - DNA, 10 bp, Homo sapiens
tgtgcgagac

SEQ ID NO: 2018 - DNA, 23 bp, Homo sapiens
tgtcagcagtatggtcgctctcc

SEQ ID NO: 2019 - DNA, 10 bp, Homo sapiens
tgtgcgaaag

SEQ ID NO: 2020 - DNA, 25 bp, Homo sapiens
tgtcagcaatatgttacttctcctc

SEQ ID NO: 2021 - DNA, 10 bp, Homo sapiens
tgtgcgagag

SEQ ID NO: 2022 - DNA, 21 bp, Homo sapiens
tgtcagcagagtagcaactgg

SEQ ID NO: 2023 - DNA, 10 bp, Homo sapiens
tgtacaaaag

SEQ ID NO: 2024 - DNA, 23 bp, Homo sapiens
tgtcaacagtataatggctggcc

SEQ ID NO: 2025 - DNA, 23 bp, Homo sapiens
tgtcaacagagttacagtactcc

SEQ ID NO: 2026 - DNA, 11 bp, Homo sapiens
tgtgcgagaga

SEQ ID NO: 2027 - DNA, 23 bp, Homo sapiens
tgtcagcagtataataactggcc

SEQ ID NO: 2028 - DNA, 11 bp, Homo sapiens
tgtgcgagaga

SEQ ID NO: 2029 - DNA, 23 bp, Homo sapiens
tgtcaacagagttacagtactcc

SEQ ID NO: 2030 - DNA, 19 bp, Homo sapiens
tgccaacaatataatagtt

SEQ ID NO: 2031 - DNA, 24 bp, Homo sapiens
tgtcaacactataatgactggcct

SEQ ID NO: 2032 - DNA, 10 bp, Homo sapiens
tgtgcgagag

SEQ ID NO: 2033 - DNA, 23 bp, Homo sapiens
tgtcaacagtatgacgatctccc

SEQ ID NO: 2034 - DNA, 22 bp, Homo sapiens
ccgctacgctgactcgaattat

SEQ ID NO: 2035 - DNA, 22 bp, Homo sapiens
taatagtggttattacgaaaat

SEQ ID NO: 2036 - DNA, 24 bp, Homo sapiens
ccggattacagcgcttctcccccc

SEQ ID NO: 2037 - DNA, 21 bp, Homo sapiens
tctcgtctgggtccagttacc

SEQ ID NO: 2038 - DNA, 16 bp, Homo sapiens
tttcgaccgtggtgca

SEQ ID NO: 2039 - DNA, 41 bp, Homo sapiens
tactacttggcggggaattgtcgtacttccaactgttatgt

SEQ ID NO: 2040 - DNA, 49 bp, Homo sapiens
gcatgtaactggttattatctaagtggtggagaggggggtggaggaacg

SEQ ID NO: 2041 - DNA, 29 bp, Homo sapiens
ttgccgtggcttttcgcgcctacgccctt

SEQ ID NO: 2042 - DNA, 29 bp, Homo sapiens
tcaggtttcagccggctacactggttatt

SEQ ID NO: 2043 - DNA, 13 bp, Homo sapiens
gcggaatagagta

SEQ ID NO: 2044 - DNA, 30 bp, Homo sapiens
caaggggacccgtggtcctaggtgaagccc

SEQ ID NO: 2045 - DNA, 30 bp, Homo sapiens
caaggggacccttagtcctaggtgaagccc

SEQ ID NO: 2046 - DNA, 26 bp, Homo sapiens
tgagggacaatatagaggtaattggg

SEQ ID NO: 2047 - DNA, 19 bp, Homo sapiens
ccgaggtggctacgccacc

SEQ ID NO: 2048 - DNA, 19 bp, Homo sapiens
ccagaatgactacggtgaa

SEQ ID NO: 2049 - DNA, 38 bp, Homo sapiens
caagttttttatgacaacgatgaccacgacgggttggg

SEQ ID NO: 2050 - DNA, 35 bp, Homo sapiens
cgaggcggcaggtgacactggataactccttctca

SEQ ID NO: 2051 - DNA, 34 bp, Homo sapiens
ccagtgccggcgggatagtgaactacttcctcct

SEQ ID NO: 2052 - DNA, 33 bp, Homo sapiens
tgaacatatatctcgtcaccgtggaggagtatc

SEQ ID NO: 2053 - DNA, 25 bp, Homo sapiens
gaagtaatggtgcggggagttactc

SEQ ID NO: 2054 - DNA, 25 bp, Homo sapiens
ggtagaggggctacggtgactactc

SEQ ID NO: 2055 - DNA, 34 bp, Homo sapiens
atgggtattgtagtcgcaccagctgtggggtctc

SEQ ID NO: 2056 - DNA, 19 bp, Homo sapiens
tcgtcatgactacggtgaa

SEQ ID NO: 2057 - DNA, 34 bp, Homo sapiens
ccagtgctggcgggattgtaaattattatctcag

SEQ ID NO: 2058 - DNA, 41 bp, Homo sapiens
ttcacgacttctggagtggtttacggtcgatagcccgtatg

SEQ ID NO: 2059 - DNA, 23 bp, Homo sapiens
taggagcgacgaagactacgata

SEQ ID NO: 2060 - DNA, 23 bp, Homo sapiens
taggacgggggcgggggacaaaa

SEQ ID NO: 2061 - DNA, 40 bp, Homo sapiens
gagcgagttcaacgggaacgatgggattgcgcgggaaaaa

SEQ ID NO: 2062 - DNA, 26 bp, Homo sapiens
gggcccttattattatggtaatagcc

SEQ ID NO: 2063 - DNA, 23 bp, Homo sapiens
agaaaggatgcaggaagtgccta

SEQ ID NO: 2064 - DNA, 20 bp, Homo sapiens
tggagggtggctacgaaccc

SEQ ID NO: 2065 - DNA, 23 bp, Homo sapiens
ctccagtgggagttactacggcg

SEQ ID NO: 2066 - DNA, 27 bp, Homo sapiens
ggtcaacgtgtggcggtagttgctact

SEQ ID NO: 2067 - DNA, 25 bp, Homo sapiens
agtccgggtatagccgtgggactta

SEQ ID NO: 2068 - DNA, 37 bp, Homo sapiens
tgggctgtggtacaaccgactgctcccctacttggcc

SEQ ID NO: 2069 - DNA, 39 bp, Homo sapiens
gcctcgcatattgtagttttggtagctgcccttaccctc

SEQ ID NO: 2070 - DNA, 49 bp, Homo sapiens
gaaggactagtgggagccaagaccgactcccacttctctggggtctgag

SEQ ID NO: 2071 - DNA, 22 bp, Homo sapiens
ctcacagtgcgacccaccaggg

SEQ ID NO: 2072 - DNA, 31 bp, Homo sapiens
tgggggtcgggcttttggagtggttattaaa

SEQ ID NO: 2073 - DNA, 19 bp, Homo sapiens
tagtgagggcagtggctgg

SEQ ID NO: 2074 - DNA, 24 bp, Homo sapiens
cgaccttccggatttttggagggg

SEQ ID NO: 2075 - DNA, 19 bp, Homo sapiens
tagtgagggcagtggctgg

SEQ ID NO: 2076 - DNA, 22 bp, Homo sapiens
ctaggcctgaccagtggctgga

SEQ ID NO: 2077 - DNA, 37 bp, Homo sapiens
ctgggctgggtacagtggatttaaggtgggggggggc

SEQ ID NO: 2078 - DNA, 10 bp, Homo sapiens
gtttccctcc

SEQ ID NO: 2079 - DNA, 22 bp, Homo sapiens
tactacttggcggggaattgtc

SEQ ID NO: 2080 - DNA, 18 bp, Homo sapiens
caggtttcagccggctac

SEQ ID NO: 2081 - DNA, 11 bp, Homo sapiens
caaggggaccc

SEQ ID NO: 2082 - DNA, 12 bp, Homo sapiens
caaggggaccct

SEQ ID NO: 2083 - DNA, 10 bp, Homo sapiens
caagtttttt

SEQ ID NO: 2084 - DNA, 10 bp, Homo sapiens
cgaggcggca

SEQ ID NO: 2085 - DNA, 12 bp, Homo sapiens
ccagtgccggcg

SEQ ID NO: 2086 - DNA, 21 bp, Homo sapiens
tgaacatatatctcgtcaccg

SEQ ID NO: 2087 - DNA, 12 bp, Homo sapiens
ccagtgctggcg

SEQ ID NO: 2088 - DNA, 12 bp, Homo sapiens
tgggggtcgggc

SEQ ID NO: 2089 - DNA, 10 bp, Homo sapiens
cgaccttccg

SEQ ID NO: 2090 - DNA, 11 bp, Homo sapiens
ctaggcctgac

SEQ ID NO: 2091 - DNA, 11 bp, Homo sapiens
ctacgctgact

SEQ ID NO: 2092 - DNA, 16 bp, Homo sapiens
taatagtggttattac

SEQ ID NO: 2093 - DNA, 13 bp, Homo sapiens
attacagcgcttc

SEQ ID NO: 2094 - DNA, 13 bp, Homo sapiens
tgggtccagttac

SEQ ID NO: 2095 - DNA, 18 bp, Homo sapiens
gtacttccaactgttatg

SEQ ID NO: 2096 - DNA, 12 bp, Homo sapiens
actggttattat

SEQ ID NO: 2097 - DNA, 14 bp, Homo sapiens
ttgccgtggctttt

SEQ ID NO: 2098 - DNA, 10 bp, Homo sapiens
actggttatt

SEQ ID NO: 2099 - DNA, 10 bp, Homo sapiens
gaatagagta

SEQ ID NO: 2100 - DNA, 13 bp, Homo sapiens
gtggtcctaggtg

SEQ ID NO: 2101 - DNA, 12 bp, Homo sapiens
tagtcctaggtg

SEQ ID NO: 2102 - DNA, 15 bp, Homo sapiens
ggacaatatagaggt

SEQ ID NO: 2103 - DNA, 11 bp, Homo sapiens
gaggtggctac

SEQ ID NO: 2104 - DNA, 12 bp, Homo sapiens
tgactacggtga

SEQ ID NO: 2105 - DNA, 16 bp, Homo sapiens
tgacaacgatgaccac

SEQ ID NO: 2106 - DNA, 12 bp, Homo sapiens
ggtgacactgga

SEQ ID NO: 2107 - DNA, 13 bp, Homo sapiens
ggatagtgaacta

SEQ ID NO: 2108 - DNA, 11 bp, Homo sapiens
tggaggagtat

SEQ ID NO: 2109 - DNA, 16 bp, Homo sapiens
atggtgcggggagtta

SEQ ID NO: 2110 - DNA, 18 bp, Homo sapiens
tagaggggctacggtgac

SEQ ID NO: 2111 - DNA, 24 bp, Homo sapiens
tgggtattgtagtcgcaccagctg

SEQ ID NO: 2112 - DNA, 12 bp, Homo sapiens
tgactacggtga

SEQ ID NO: 2113 - DNA, 14 bp, Homo sapiens
ggattgtaaattat

SEQ ID NO: 2114 - DNA, 18 bp, Homo sapiens
acgacttctggagtggtt

SEQ ID NO: 2115 - DNA, 11 bp, Homo sapiens
acgaagactac

SEQ ID NO: 2116 - DNA, 11 bp, Homo sapiens
taggacggggg

SEQ ID NO: 2117 - DNA, 15 bp, Homo sapiens
gttcaacgggaacga

SEQ ID NO: 2118 - DNA, 17 bp, Homo sapiens
tattattatggtaatag

SEQ ID NO: 2119 - DNA, 10 bp, Homo sapiens
gtggctacga

SEQ ID NO: 2120 - DNA, 15 bp, Homo sapiens
agtgggagttactac

SEQ ID NO: 2121 - DNA, 18 bp, Homo sapiens
gtggcggtagttgctact

SEQ ID NO: 2122 - DNA, 14 bp, Homo sapiens
gggtatagccgtgg

SEQ ID NO: 2123 - DNA, 15 bp, Homo sapiens
gtacaaccgactgct

SEQ ID NO: 2124 - DNA, 22 bp, Homo sapiens
atattgtagttttggtagctgc

SEQ ID NO: 2125 - DNA, 10 bp, Homo sapiens
tagtgggagc

SEQ ID NO: 2126 - DNA, 12 bp, Homo sapiens
agtgcgacccac

SEQ ID NO: 2127 - DNA, 17 bp, Homo sapiens
ttttggagtggttatta

SEQ ID NO: 2128 - DNA, 11 bp, Homo sapiens
gcagtggctgg

SEQ ID NO: 2129 - DNA, 14 bp, Homo sapiens
gatttttggagggg

SEQ ID NO: 2130 - DNA, 11 bp, Homo sapiens
gcagtggctgg

SEQ ID NO: 2131 - DNA, 10 bp, Homo sapiens
cagtggctgg

SEQ ID NO: 2132 - DNA, 12 bp, Homo sapiens
tgggtacagtgg

SEQ ID NO: 2133 - DNA, 30 bp, Homo sapiens
ctaagtggtggagaggggggtggaggaacg

SEQ ID NO: 2134 - DNA, 15 bp, Homo sapiens
cgcgcctacgccctt

SEQ ID NO: 2135 - DNA, 11 bp, Homo sapiens
gacgggttggg

SEQ ID NO: 2136 - DNA, 13 bp, Homo sapiens
taactccttctca

SEQ ID NO: 2137 - DNA, 20 bp, Homo sapiens
tacggtcgatagcccgtatg

SEQ ID NO: 2138 - DNA, 12 bp, Homo sapiens
cgggggacaaaa

SEQ ID NO: 2139 - DNA, 18 bp, Homo sapiens
tgggattgcgcgggaaaa

SEQ ID NO: 2140 - DNA, 13 bp, Homo sapiens
cccctacttggcc

SEQ ID NO: 2141 - DNA, 10 bp, Homo sapiens
ccttaccctc

SEQ ID NO: 2142 - DNA, 32 bp, Homo sapiens
caagaccgactcccacttctctggggtctgag

SEQ ID NO: 2143 - DNA, 19 bp, Homo sapiens
atttaaggtgggggggggc

SEQ ID NO: 2144 - DNA, 15 bp, Homo sapiens
tactttgactcctgg

SEQ ID NO: 2145 - DNA, 10 bp, Homo sapiens
gctcactttc

SEQ ID NO: 2146 - DNA, 27 bp, Homo sapiens
taccactactacggcatggacgtctgg

SEQ ID NO: 2147 - DNA, 10 bp, Homo sapiens
gtacactttt

SEQ ID NO: 2148 - DNA, 17 bp, Homo sapiens
acttcatggatgtctgg

SEQ ID NO: 2149 - DNA, 10 bp, Homo sapiens
gctcactttc

SEQ ID NO: 2150 - DNA, 10 bp, Homo sapiens
tgactactgg

SEQ ID NO: 2151 - DNA, 13 bp, Homo sapiens
ctttgactactgg

SEQ ID NO: 2152 - DNA, 12 bp, Homo sapiens
ttggacgtctgg

SEQ ID NO: 2153 - DNA, 10 bp, Homo sapiens
gctcactttc

SEQ ID NO: 2154 - DNA, 12 bp, Homo sapiens
tttgacgactgg

SEQ ID NO: 2155 - DNA, 17 bp, Homo sapiens
accactttgactactgg

SEQ ID NO: 2156 - DNA, 24 bp, Homo sapiens
tactactacggtatggacgtctgg

SEQ ID NO: 2157 - DNA, 11 bp, Homo sapiens
ttgcctactgg

SEQ ID NO: 2158 - DNA, 11 bp, Homo sapiens
ttgactcctgg

SEQ ID NO: 2159 - DNA, 17 bp, Homo sapiens
accactttgactactgg

SEQ ID NO: 2160 - DNA, 30 bp, Homo sapiens
tactactactactactacgtggacgtctgg

SEQ ID NO: 2161 - DNA, 18 bp, Homo sapiens
gatcctttagatgtctgg

SEQ ID NO: 2162 - DNA, 11 bp, Homo sapiens
tgtacactttt

SEQ ID NO: 2163 - DNA, 25 bp, Homo sapiens
ctactactacggtctggacgtctgg

SEQ ID NO: 2164 - DNA, 18 bp, Homo sapiens
taccctatggacgtctgg

SEQ ID NO: 2165 - DNA, 13 bp, Homo sapiens
ttttgatatttgg

SEQ ID NO: 2166 - DNA, 20 bp, Homo sapiens
actacggaatggacgtgtgg

SEQ ID NO: 2167 - DNA, 10 bp, Homo sapiens
tgaatcctgg

SEQ ID NO: 2168 - DNA, 14 bp, Homo sapiens
actttgactactgg

SEQ ID NO: 2169 - DNA, 10 bp, Homo sapiens
gatcaccttc

SEQ ID NO: 2170 - DNA, 11 bp, Homo sapiens
ttgactactgg

SEQ ID NO: 2171 - DNA, 10 bp, Homo sapiens
gtggacgttc

SEQ ID NO: 2172 - DNA, 18 bp, Homo sapiens
gatccctttgatatctgg

SEQ ID NO: 2173 - DNA, 10 bp, Homo sapiens
gctcactttc

SEQ ID NO: 2174 - DNA, 13 bp, Homo sapiens
ttttaatatctgg

SEQ ID NO: 2175 - DNA, 23 bp, Homo sapiens
actactacgctatggacgtctgg

SEQ ID NO: 2176 - DNA, 11 bp, Homo sapiens
ttggctactgg

SEQ ID NO: 2177 - DNA, 10 bp, Homo sapiens
gtggacgttc

SEQ ID NO: 2178 - DNA, 17 bp, Homo sapiens
atgcttttgatgtctgg

SEQ ID NO: 2179 - DNA, 19 bp, Homo sapiens
tgatgcctttgatatctgg

SEQ ID NO: 2180 - DNA, 10 bp, Homo sapiens
gtacactttt

SEQ ID NO: 2181 - DNA, 14 bp, Homo sapiens
accttgacttctgg

SEQ ID NO: 2182 - DNA, 11 bp, Homo sapiens
ttgactcctgg

SEQ ID NO: 2183 - DNA, 10 bp, Homo sapiens
attcactttc

SEQ ID NO: 2184 - DNA, 17 bp, Homo sapiens
actactttgactactgg

SEQ ID NO: 2185 - DNA, 17 bp, Homo sapiens
acaggctcgacccctgg

SEQ ID NO: 2186 - DNA, 10 bp, Homo sapiens
attcactttc

SEQ ID NO: 2187 - DNA, 11 bp, Homo sapiens
ttgactactgg

SEQ ID NO: 2188 - DNA, 28 bp, Homo sapiens
ctactactactacggtctggacgtctgg

SEQ ID NO: 2189 - DNA, 11 bp, Homo sapiens
ttgactattgg

SEQ ID NO: 2190 - DNA, 16 bp, Homo sapiens
tggttttgatatctgg

SEQ ID NO: 2191 - DNA, 13 bp, Homo sapiens
ctttgactactgg

SEQ ID NO: 2192 - DNA, 11 bp, Homo sapiens
tgtacactttt

SEQ ID NO: 2193 - DNA, 27 bp, Homo sapiens
tactactactacggtatggacgtctgg

SEQ ID NO: 2194 - DNA, 15 bp, Homo sapiens
tactttgactactgg

SEQ ID NO: 2195 - DNA, 27 bp, Homo sapiens
tactactactactacatggacgtctgg

SEQ ID NO: 2196 - DNA, 15 bp, Homo sapiens
tactttgactactgg

SEQ ID NO: 2197 - DNA, 11 bp, Homo sapiens
ttgactactgg

SEQ ID NO: 2198 - DNA, 10 bp, Homo sapiens
gtgcagtttt

SEQ ID NO: 2199 - DNA, 13 bp, Homo sapiens
cttcgaccactgg

SEQ ID NO: 2200 - DNA, 10 bp, Homo sapiens
gtatactttt

SEQ ID NO: 2201 - DNA, 65 bp, Homo sapiens
ctacgctgactcgaattattactttgactcctggggcccgggaaccctggtcaccgtctcctcag

SEQ ID NO: 2202 - DNA, 79 bp, Homo sapiens
taatagtggttattacgaaaattaccactactacggcatggacgtctggggcaaagggaccacggtcaccgtctcctca

SEQ ID NO: 2203 - DNA, 67 bp, Homo sapiens
attacagcgcttctccccccacttcatggatgtctggggcacagggaccacggtcaccgtctcctca

SEQ ID NO: 2204 - DNA, 55 bp, Homo sapiens
tgggtccagttacctgactactggggccagggaaccctggtcaccgtctcctcag

SEQ ID NO: 2205 - DNA, 51 bp, Homo sapiens
accgtggtgcagagcactggggccagggaaccctggtcaccgtctcctcag

SEQ ID NO: 2206 - DNA, 63 bp, Homo sapiens
gtacttccaactgttatgtctttgactactggggccggggaaccctggtcaccgtctcctcag

SEQ ID NO: 2207 - DNA, 84 bp, Homo sapiens
actggttattatctaagtggtggagaggggggtggaggaacgttggacgtctggggcaaagggaccacggtcaccgtctcctca

SEQ ID NO: 2208 - DNA, 46 bp, Homo sapiens
caatgggattactggggccagggaaccctggtcaccgtctcctcag

SEQ ID NO: 2209 - DNA, 72 bp, Homo sapiens
ttgccgtggcttttcgcgcctacgccctttttgacgactggggccagggagccctggtcaccgtctcctcag

SEQ ID NO: 2210 - DNA, 58 bp, Homo sapiens
actggttattaccactttgactactggggccagggaaccctggtcaccgtctcctcag

SEQ ID NO: 2211 - DNA, 64 bp, Homo sapiens
gaatagagtatactactacggtatggacgtctggggcaaagggaccacggtcaccgtctcctca

SEQ ID NO: 2212 - DNA, 61 bp, Homo sapiens
gtggtcctaggtgaagcccttgcctactggggccagggagccctggtcaccgtctcctcag

SEQ ID NO: 2213 - DNA, 60 bp, Homo sapiens
tagtcctaggtgaagcccttgactcctggggccagggaaccctggtcaccgtctcctcag

SEQ ID NO: 2214 - DNA, 70 bp, Homo sapiens
ggacaatatagaggtaattgggaccactttgactactggggccagggaaccctggtcaccgtctcctcag

SEQ ID NO: 2215 - DNA, 77 bp, Homo sapiens
gaggtggctacgccacctactactactactactacgtggacgtctggggcaaagggaccacggtcaccgtctcctca

SEQ ID NO: 2216 - DNA, 62 bp, Homo sapiens
tgactacggtgaagatcctttagatgtctggggccaagggacaatggtcaccgtctcttcag

SEQ ID NO: 2217 - DNA, 82 bp, Homo sapiens
tgacaacgatgaccacgacgggttgggctactactacggtctggacgtctggggcaaagggaccacggtcaccgtctcctca

SEQ ID NO: 2218 - DNA, 73 bp, Homo sapiens
ggtgacactggataactccttctcataccctatggacgtctggggccaagggaccacggtcaccgtctcctca

SEQ ID NO: 2219 - DNA, 66 bp, Homo sapiens
ggatagtgaactacttcctcctttttgatatttggggccaagggacaatggtcaccgtctcttcag

SEQ ID NO: 2220 - DNA, 62 bp, Homo sapiens
tggaggagtatcactacggaatggacgtgtggggcctagggaccacggtcaccgtctcctca

SEQ ID NO: 2221 - DNA, 60 bp, Homo sapiens
atggtgcggggagttactctgaatcctggggccagggaaccctggtcaccgtctcctcag

SEQ ID NO: 2222 - DNA, 68 bp, Homo sapiens
tagaggggctacggtgactactcactttgactactggggccagggaaccctggtcaccgtctcctcag

SEQ ID NO: 2223 - DNA, 75 bp, Homo sapiens
tgggtattgtagtcgcaccagctgtggggtctcttgactactggggccagggaaccctggtcaccgtctcctcag

SEQ ID NO: 2224 - DNA, 62 bp, Homo sapiens
tgactacggtgaagatccctttgatatctggggccaagggacaatggtcaccgtctcttcag

SEQ ID NO: 2225 - DNA, 66 bp, Homo sapiens
ggattgtaaattattatctcagttttaatatctggggccaggggacaatggtcaccgtctcttcag

SEQ ID NO: 2226 - DNA, 91 bp, Homo sapiens
acgacttctggagtggtttacggtcgatagcccgtatgactactacgctatggacgtctggggccaagggaccacggtcaccgtctcctca

SEQ ID NO: 2227 - DNA, 57 bp, Homo sapiens
acgaagactacgatattggctactggggccagggaaccctggtcaccgtctcctcag

SEQ ID NO: 2228 - DNA, 71 bp, Homo sapiens
taggacgggggcgggggacaaaaatgcttttgatgtctggggcccagggacaatggtcaccgtctcttcag

SEQ ID NO: 2229 - DNA, 84 bp, Homo sapiens
gttcaacgggaacgatgggattgcgcgggaaaaatgatgcctttgatatctggggccaagggacaatggtcaccgtctcttcag

SEQ ID NO: 2230 - DNA, 64 bp, Homo sapiens
tattattatggtaatagccaccttgacttctggggccagggaacaatggtcaccgtctcttcag

SEQ ID NO: 2231 - DNA, 56 bp, Homo sapiens
gtggctacgaacccttgactcctggggccagggaaccctggtcaccgtctcctcag

SEQ ID NO: 2232 - DNA, 67 bp, Homo sapiens
agtgggagttactacggcgactactttgactactggggccagggaaccctggtcaccgtctcctcag

SEQ ID NO: 2233 - DNA, 66 bp, Homo sapiens
gtggcggtagttgctactacaggctcgacccctggggccagggaaccctggtcaccgtctcctcag

SEQ ID NO: 2234 - DNA, 62 bp, Homo sapiens
gggtatagccgtgggacttattgactactggggccagggatccctggtcaccgtctcctcag

SEQ ID NO: 2235 - DNA, 86 bp, Homo sapiens
gtacaaccgactgctcccctacttggccctactactactacggtctggacgtctggggccaggggaccacggtcaccgtctcctca

SEQ ID NO: 2236 - DNA, 74 bp, Homo sapiens
atattgtagttttggtagctgcccttaccctcttgactattggggccagggaaccctggtcaccgtctcctcag

SEQ ID NO: 2237 - DNA, 89 bp, Homo sapiens
tagtgggagccaagaccgactcccacttctctggggtctgagtggttttgatatctggggccaagggacaatggtcaccgtctcttcag

SEQ ID NO: 2238 - DNA, 61 bp, Homo sapiens
agtgcgacccaccagggctttgactactggggccagggaagcctggtcaccgtctcctcag

SEQ ID NO: 2239 - DNA, 76 bp, Homo sapiens
ttttggagtggttattaaatactactactacggtatggacgtctggggccaagggaccacggtcaccgtctcctca

SEQ ID NO: 2240 - DNA, 57 bp, Homo sapiens
gcagtggctggtactttgactactggggccagggaaccctggtcaccgtctcctcag

SEQ ID NO: 2241 - DNA, 71 bp, Homo sapiens
gatttttggaggggtactactactactacatggacgtctggggcaaagggaccacggtcaccgtctcctca

SEQ ID NO: 2242 - DNA, 57 bp, Homo sapiens; identical to SEQ ID NO: 2240

SEQ ID NO: 2243 - DNA, 53 bp, Homo sapiens
cagtggctggattgactactggggacagggaatcctggtcaccgtctcctcag

SEQ ID NO: 2244 - DNA, 75 bp, Homo sapiens
tgggtacagtggatttaaggtgggggggggccttcgaccactggggcaagggaatcctggtcaccgtctcctcag

SEQ ID NO: 2245 - DNA, 46 bp, Homo sapiens
tactttgactcctggggcccgggaaccctggtcaccgtctcctcag

SEQ ID NO: 2246 - DNA, 38 bp, Homo sapiens
gctcactttcggcggagggaccaaggtggagatcaaac

SEQ ID NO: 2247 - DNA, 57 bp, Homo sapiens
taccactactacggcatggacgtctggggcaaagggaccacggtcaccgtctcctca

SEQ ID NO: 2248 - DNA, 38 bp, Homo sapiens
gtacacttttggccaggggaccaaggtggagatcaaac

SEQ ID NO: 2249 - DNA, 47 bp, Homo sapiens
acttcatggatgtctggggcacagggaccacggtcaccgtctcctca

SEQ ID NO: 2250 - DNA, 38 bp, Homo sapiens
gctcactttcggcggggggaccaaggtggaaatcaaac

SEQ ID NO: 2251 - DNA, 41 bp, Homo sapiens
tgactactggggccagggaaccctggtcaccgtctcctcag

SEQ ID NO: 2252 - DNA, 34 bp, Homo sapiens
acgttcggccaagggaccaaggtggaaatcaaac

SEQ ID NO: 2253 - DNA, 40 bp, Homo sapiens
gagcactggggccagggaaccctggtcaccgtctcctcag

SEQ ID NO: 2254 - DNA, 34 bp, Homo sapiens; identical to SEQ ID NO: 2252

SEQ ID NO: 2255 - DNA, 44 bp, Homo sapiens
ctttgactactggggccggggaaccctggtcaccgtctcctcag

SEQ ID NO: 2256 - DNA, 35 bp, Homo sapiens
cacttttggccaggggaccaaggtggaaatcaaac

SEQ ID NO: 2257 - DNA, 42 bp, Homo sapiens
ttggacgtctggggcaaagggaccacggtcaccgtctcctca

SEQ ID NO: 2258 - DNA, 38 bp, Homo sapiens; identical to SEQ ID NO: 2246

SEQ ID NO: 2259 - DNA, 40 bp, Homo sapiens
gattactggggccagggaaccctggtcaccgtctcctcag

SEQ ID NO: 2260 - DNA, 36 bp, Homo sapiens
tcactttcggcggagggaccaaggtggagatcaaac

SEQ ID NO: 2261 - DNA, 43 bp, Homo sapiens
tttgacgactggggccagggagccctggtcaccgtctcctcag

SEQ ID NO: 2262 - DNA, 36 bp, Homo sapiens
ggacgttcggccaagggaccaaggtggaaatcaaac

SEQ ID NO: 2263 - DNA, 48 bp, Homo sapiens
accactttgactactggggccagggaaccctggtcaccgtctcctcag

SEQ ID NO: 2264 - DNA, 36 bp, Homo sapiens
tcactttcggccctgggaccaaagtggatatcaaac

SEQ ID NO: 2265 - DNA, 54 bp, Homo sapiens
tactactacggtatggacgtctggggcaaagggaccacggtcaccgtctcctca

SEQ ID NO: 2266 - DNA, 34 bp, Homo sapiens
actttcggcggagggaccaaggtggaaatcaaac

SEQ ID NO: 2267 - DNA, 42 bp, Homo sapiens
ttgcctactggggccagggagccctggtcaccgtctcctcag

SEQ ID NO: 2268 - DNA, 32 bp, Homo sapiens
gttcggccaagggaccaaggtggaaatcaaac

SEQ ID NO: 2269 - DNA, 42 bp, Homo sapiens
ttgactcctggggccagggaaccctggtcaccgtctcctcag

SEQ ID NO: 2270 - DNA, 32 bp, Homo sapiens; identical to SEQ ID NO: 2268

SEQ ID NO: 2271 - DNA, 48 bp, Homo sapiens; identical to SEQ ID NO: 2263

SEQ ID NO: 2272 - DNA, 36 bp, Homo sapiens; identical to SEQ ID NO: 2262

SEQ ID NO: 2273 - DNA, 60 bp, Homo sapiens
tactactactactactacgtggacgtctggggcaaagggaccacggtcaccgtctcctca

SEQ ID NO: 2274 - DNA, 36 bp, Homo sapiens
tcactttcggcggagggaccaaggtggaaatcaaac

SEQ ID NO: 2275 - DNA, 34 bp, Homo sapiens
acttttggccaggggaccaaggtggaaatcaaac

SEQ ID NO: 2276 - DNA, 49 bp, Homo sapiens
gatcctttagatgtctggggccaagggacaatggtcaccgtctcttcag

SEQ ID NO: 2277 - DNA, 39 bp, Homo sapiens
tgtacacttttggccaggggaccaaggtggaaatcaaac

SEQ ID NO: 2278 - DNA, 55 bp, Homo sapiens
ctactactacggtctggacgtctggggcaaagggaccacggtcaccgtctcctca

SEQ ID NO: 2279 - DNA, 34 bp, Homo sapiens
actttcggccaagggaccaaggtggaaatcaaac

SEQ ID NO: 2280 - DNA, 48 bp, Homo sapiens
taccctatggacgtctggggccaagggaccacggtcaccgtctcctca

SEQ ID NO: 2281 - DNA, 35 bp, Homo sapiens
cactttcggcggagggaccaaggtggaaatcaaac

SEQ ID NO: 2282 - DNA, 44 bp, Homo sapiens
ttttgatatttggggccaagggacaatggtcaccgtctcttcag

SEQ ID NO: 2283 - DNA, 36 bp, Homo sapiens
ggacgttcggccaagggaccaaggtggagatcaaac

SEQ ID NO: 2284 - DNA, 50 bp, Homo sapiens
actacggaatggacgtgtggggcctagggaccacggtcaccgtctcctca

SEQ ID NO: 2285 - DNA, 37 bp, Homo sapiens
ttcactttcggcccggggaccaaagtggatatcaaac

SEQ ID NO: 2286 - DNA, 41 bp, Homo sapiens
tgaatcctggggccagggaaccctggtcaccgtctcctcag

SEQ ID NO: 2287 - DNA, 32 bp, Homo sapiens
tttcggcggagggaccaaggtggaaatcaaac

SEQ ID NO: 2288 - DNA, 45 bp, Homo sapiens
actttgactactggggccagggaaccctggtcaccgtctcctcag

SEQ ID NO: 2289 - DNA, 38 bp, Homo sapiens
gatcaccttcggccaagggacacgactggagattaaac

SEQ ID NO: 2290 - DNA, 42 bp, Homo sapiens
ttgactactggggccagggaaccctggtcaccgtctcctcag

SEQ ID NO: 2291 - DNA, 38 bp, Homo sapiens
gtggacgttcggccaagggaccaaggtggaaatcaaac

SEQ ID NO: 2292 - DNA, 49 bp, Homo sapiens
gatccctttgatatctggggccaagggacaatggtcaccgtctcttcag

SEQ ID NO: 2293 - DNA, 38 bp, Homo sapiens
gctcactttcggcggagggaccaaggtggaaatcaaac

SEQ ID NO: 2294 - DNA, 44 bp, Homo sapiens
ttttaatatctggggccaggggacaatggtcaccgtctcttcag

SEQ ID NO: 2295 - DNA, 36 bp, Homo sapiens
ggacattcggccaagggaccaaggtggaaatcaaac

SEQ ID NO: 2296 - DNA, 53 bp, Homo sapiens
actactacgctatggacgtctggggccaagggaccacggtcaccgtctcctca

SEQ ID NO: 2297 - DNA, 36 bp, Homo sapiens; identical to SEQ ID NO: 2262

SEQ ID NO: 2298 - DNA, 42 bp, Homo sapiens
ttggctactggggccagggaaccctggtcaccgtctcctcag

SEQ ID NO: 2299 - DNA, 38 bp, Homo sapiens
gtggacgttcggccaagggaccaaggtggagatcaaac

SEQ ID NO: 2300 - DNA, 48 bp, Homo sapiens
atgcttttgatgtctggggcccagggacaatggtcaccgtctcttcag

SEQ ID NO: 2301 - DNA, 35 bp, Homo sapiens
gacgttcggccgagggaccaaggtggaaatcaaac

SEQ ID NO: 2302 - DNA, 50 bp, Homo sapiens
tgatgcctttgatatctggggccaagggacaatggtcaccgtctcttcag

SEQ ID NO: 2303 - DNA, 38 bp, Homo sapiens; identical to SEQ ID NO: 2248

SEQ ID NO: 2304 - DNA, 45 bp, Homo sapiens
accttgacttctggggccagggaacaatggtcaccgtctcttcag

SEQ ID NO: 2305 - DNA, 36 bp, Homo sapiens; identical to SEQ ID NO: 2262

SEQ ID NO: 2306 - DNA, 32 bp, Homo sapiens
taaaagttttgatgtctggggccaagggacaa

SEQ ID NO: 2307 - DNA, 35 bp, Homo sapiens
gacgttcggccaagggaccaaggtggaaatcaaac

SEQ ID NO: 2308 - DNA, 42 bp, Homo sapiens; identical to SEQ ID NO: 2269

SEQ ID NO: 2309 - DNA, 38 bp, Homo sapiens
attcactttcggccctgggaccaaagtggatatcaaac

SEQ ID NO: 2310 - DNA, 48 bp, Homo sapiens
actactttgactactggggccagggaaccctggtcaccgtctcctcag

SEQ ID NO: 2311 - DNA, 36 bp, Homo sapiens
ggacgttcggccaggggaccaaggtggagatcaaac

SEQ ID NO: 2312 - DNA, 48 bp, Homo sapiens
acaggctcgacccctggggccagggaaccctggtcaccgtctcctcag

SEQ ID NO: 2313 - DNA, 38 bp, Homo sapiens; identical to SEQ ID NO: 2309

SEQ ID NO: 2314 - DNA, 42 bp, Homo sapiens
ttgactactggggccagggatccctggtcaccgtctcctcag

SEQ ID NO: 2315 - DNA, 36 bp, Homo sapiens; identical to SEQ ID NO: 2262

SEQ ID NO: 2316 - DNA, 58 bp, Homo sapiens
ctactactactacggtctggacgtctggggccaggggaccacggtcaccgtctcctca

SEQ ID NO: 2317 - DNA, 35 bp, Homo sapiens
caccttcggccaagggacacgactggagattaaac

SEQ ID NO: 2318 - DNA, 42 bp, Homo sapiens
ttgactattggggccagggaaccctggtcaccgtctcctcag

SEQ ID NO: 2319 - DNA, 36 bp, Homo sapiens
ggacttttggccaggggaccaaggtggaaatcaaac

SEQ ID NO: 2320 - DNA, 47 bp, Homo sapiens
tggttttgatatctggggccaagggacaatggtcaccgtctcttcag

SEQ ID NO: 2321 - DNA, 36 bp, Homo sapiens
tcactttcggcgcagggaccaaggtggaaatcaaac

SEQ ID NO: 2322 - DNA, 44 bp, Homo sapiens
ctttgactactggggccagggaagcctggtcaccgtctcctcag

SEQ ID NO: 2323 - DNA, 39 bp, Homo sapiens
tgtacacttttggccaggggaccaaggtggagatcaaac

SEQ ID NO: 2324 - DNA, 57 bp, Homo sapiens
tactactactacggtatggacgtctggggccaagggaccacggtcaccgtctcctca

SEQ ID NO: 2325 - DNA, 37 bp, Homo sapiens
atcaccttcggccaagggacacgactggagattaaac

SEQ ID NO: 2326 - DNA, 46 bp, Homo sapiens
tactttgactactggggccagggaaccctggtcaccgtctcctcag

SEQ ID NO: 2327 - DNA, 57 bp, Homo sapiens
tactactactactacatggacgtctggggcaaagggaccacggtcaccgtctcctca

SEQ ID NO: 2328 - DNA, 37 bp, Homo sapiens
ctcactttcggcggagggaccaaggtggagatcaaac

SEQ ID NO: 2329 - DNA, 46 bp, Homo sapiens; identical to SEQ ID NO: 2326

SEQ ID NO: 2330 - DNA, 37 bp, Homo sapiens; identical to SEQ ID NO: 2325

SEQ ID NO: 2331 - DNA, 42 bp, Homo sapiens
ttgactactggggacagggaatcctggtcaccgtctcctcag

SEQ ID NO: 2332 - DNA, 36 bp, Homo sapiens
ggacattcggccaggggaccaaggtggaaatcaaac

SEQ ID NO: 2333 - DNA, 38 bp, Homo sapiens
gtgcagttttggccaggggaccaagctggagatcacac

SEQ ID NO: 2334 - DNA, 44 bp, Homo sapiens
cttcgaccactggggcaagggaatcctggtcaccgtctcctcag

SEQ ID NO: 2335 - DNA, 38 bp, Homo sapiens
gtatacttttggccaggggaccaaggtggagatcaaac

SEQ ID NO: 2336 - DNA, 34 bp, Homo sapiens
tggggcccgggaaccctggtcaccgtctcctcag

SEQ ID NO: 2337 - DNA, 31 bp, Homo sapiens
ttcggcggagggaccaaggtggagatcaaac

SEQ ID NO: 2338 - DNA, 33 bp, Homo sapiens; identical to SEQ ID NO: 49

SEQ ID NO: 2339 - DNA, 31 bp, Homo sapiens
tttggccaggggaccaaggtggagatcaaac

SEQ ID NO: 2340 - DNA, 33 bp, Homo sapiens
tggggcacagggaccacggtcaccgtctcctca

SEQ ID NO: 2341 - DNA, 31 bp, Homo sapiens
ttcggcggggggaccaaggtggaaatcaaac

SEQ ID NO: 2342 - DNA, 34 bp, Homo sapiens
tggggccagggaaccctggtcaccgtctcctcag

SEQ ID NO: 2343 - DNA, 31 bp, Homo sapiens
ttcggccaagggaccaaggtggaaatcaaac

SEQ ID NO: 2344 - DNA, 34 bp, Homo sapiens; identical to SEQ ID NO: 2342

SEQ ID NO: 2345 - DNA, 31 bp, Homo sapiens; identical to SEQ ID NO: 2343

SEQ ID NO: 2346 - DNA, 34 bp, Homo sapiens
tggggccggggaaccctggtcaccgtctcctcag

SEQ ID NO: 2347 - DNA, 31 bp, Homo sapiens
tttggccaggggaccaaggtggaaatcaaac

SEQ ID NO: 2348 - DNA, 33 bp, Homo sapiens; identical to SEQ ID NO: 49

SEQ ID NO: 2349 - DNA, 31 bp, Homo sapiens; identical to SEQ ID NO: 2337

SEQ ID NO: 2350 - DNA, 34 bp, Homo sapiens; identical to SEQ ID NO: 2342

SEQ ID NO: 2351 - DNA, 31 bp, Homo sapiens; identical to SEQ ID NO: 2337

SEQ ID NO: 2352 - DNA, 34 bp, Homo sapiens
tggggccagggagccctggtcaccgtctcctcag

SEQ ID NO: 2353 - DNA, 31 bp, Homo sapiens; identical to SEQ ID NO: 2343

SEQ ID NO: 2354 - DNA, 34 bp, Homo sapiens; identical to SEQ ID NO: 2342

SEQ ID NO: 2355 - DNA, 31 bp, Homo sapiens
ttcggccctgggaccaaagtggatatcaaac

SEQ ID NO: 2356 - DNA, 33 bp, Homo sapiens; identical to SEQ ID NO: 49

SEQ ID NO: 2357 - DNA, 31 bp, Homo sapiens
ttcggcggagggaccaaggtggaaatcaaac

SEQ ID NO: 2358 - DNA, 34 bp, Homo sapiens; identical to SEQ ID NO: 2352

SEQ ID NO: 2359 - DNA, 31 bp, Homo sapiens; identical to SEQ ID NO: 2343

SEQ ID NO: 2360 - DNA, 34 bp, Homo sapiens; identical to SEQ ID NO: 2342

SEQ ID NO: 2361 - DNA, 31 bp, Homo sapiens; identical to SEQ ID NO: 2343

SEQ ID NO: 2362 - DNA, 34 bp, Homo sapiens; identical to SEQ ID NO: 2342

SEQ ID NO: 2363 - DNA, 31 bp, Homo sapiens; identical to SEQ ID NO: 2343

SEQ ID NO: 2364 - DNA, 33 bp, Homo sapiens; identical to SEQ ID NO: 49

SEQ ID NO: 2365 - DNA, 31 bp, Homo sapiens; identical to SEQ ID NO: 2357

SEQ ID NO: 2366 - DNA, 31 bp, Homo sapiens; identical to SEQ ID NO: 2347

SEQ ID NO: 2367 - DNA, 34 bp, Homo sapiens
tggggccaagggacaatggtcaccgtctcttcag

SEQ ID NO: 2368 - DNA, 31 bp, Homo sapiens; identical to SEQ ID NO: 2347

SEQ ID NO: 2369 - DNA, 33 bp, Homo sapiens; identical to SEQ ID NO: 49

SEQ ID NO: 2370 - DNA, 31 bp, Homo sapiens; identical to SEQ ID NO: 2343

SEQ ID NO: 2371 - DNA, 33 bp, Homo sapiens
tggggccaagggaccacggtcaccgtctcctca

SEQ ID NO: 2372 - DNA, 31 bp, Homo sapiens; identical to SEQ ID NO: 2357

SEQ ID NO: 2373 - DNA, 34 bp, Homo sapiens; identical to SEQ ID NO: 2367

SEQ ID NO: 2374 - DNA, 31 bp, Homo sapiens
ttcggccaagggaccaaggtggagatcaaac

SEQ ID NO: 2375 - DNA, 33 bp, Homo sapiens
tggggcctagggaccacggtcaccgtctcctca

SEQ ID NO: 2376 - DNA, 31 bp, Homo sapiens
ttcggcccggggaccaaagtggatatcaaac

SEQ ID NO: 2377 - DNA, 34 bp, Homo sapiens; identical to SEQ ID NO: 2342

SEQ ID NO: 2378 - DNA, 31 bp, Homo sapiens; identical to SEQ ID NO: 2357

SEQ ID NO: 2379 - DNA, 34 bp, Homo sapiens; identical to SEQ ID NO: 2342

SEQ ID NO: 2380 - DNA, 31 bp, Homo sapiens
ttcggccaagggacacgactggagattaaac

SEQ ID NO: 2381 - DNA, 34 bp, Homo sapiens; identical to SEQ ID NO: 2342

SEQ ID NO: 2382 - DNA, 31 bp, Homo sapiens; identical to SEQ ID NO: 2343

SEQ ID NO: 2383 - DNA, 34 bp, Homo sapiens; identical to SEQ ID NO: 2367

SEQ ID NO: 2384 - DNA, 31 bp, Homo sapiens; identical to SEQ ID NO: 2357

SEQ ID NO: 2385 - DNA, 34 bp, Homo sapiens
tggggccaggggacaatggtcaccgtctcttcag

SEQ ID NO: 2386 - DNA, 31 bp, Homo sapiens; identical to SEQ ID NO: 2343

SEQ ID NO: 2387 - DNA, 33 bp, Homo sapiens; identical to SEQ ID NO: 2371

SEQ ID NO: 2388 - DNA, 31 bp, Homo sapiens; identical to SEQ ID NO: 2343

SEQ ID NO: 2389 - DNA, 34 bp, Homo sapiens; identical to SEQ ID NO: 2342

SEQ ID NO: 2390 - DNA, 31 bp, Homo sapiens; identical to SEQ ID NO: 2374

SEQ ID NO: 2391 - DNA, 34 bp, Homo sapiens
tggggcccagggacaatggtcaccgtctcttcag

SEQ ID NO: 2392 - DNA, 31 bp, Homo sapiens
ttcggccgagggaccaaggtggaaatcaaac

SEQ ID NO: 2393 - DNA, 34 bp, Homo sapiens; identical to SEQ ID NO: 2367

SEQ ID NO: 2394 - DNA, 31 bp, Homo sapiens; identical to SEQ ID NO: 2339

SEQ ID NO: 2395 - DNA, 34 bp, Homo sapiens
tggggccagggaacaatggtcaccgtctcttcag

SEQ ID NO: 2396 - DNA, 31 bp, Homo sapiens; identical to SEQ ID NO: 2343

SEQ ID NO: 2397 - DNA, 16 bp, Homo sapiens
tggggccaagggacaa

SEQ ID NO: 2398 - DNA, 31 bp, Homo sapiens; identical to SEQ ID NO: 2343

SEQ ID NO: 2399 - DNA, 34 bp, Homo sapiens; identical to SEQ ID NO: 2342

SEQ ID NO: 2400 - DNA, 31 bp, Homo sapiens; identical to SEQ ID NO: 2355

SEQ ID NO: 2401 - DNA, 34 bp, Homo sapiens; identical to SEQ ID NO: 2342

SEQ ID NO: 2402 - DNA, 31 bp, Homo sapiens
ttcggccaggggaccaaggtggagatcaaac

SEQ ID NO: 2403 - DNA, 34 bp, Homo sapiens; identical to SEQ ID NO: 2342

SEQ ID NO: 2404 - DNA, 31 bp, Homo sapiens; identical to SEQ ID NO: 2355

SEQ ID NO: 2405 - DNA, 34 bp, Homo sapiens
tggggccagggatccctggtcaccgtctcctcag

SEQ ID NO: 2406 - DNA, 31 bp, Homo sapiens; identical to SEQ ID NO: 2343

SEQ ID NO: 2407 - DNA, 33 bp, Homo sapiens
tggggccaggggaccacggtcaccgtctcctca

SEQ ID NO: 2408 - DNA, 31 bp, Homo sapiens; identical to SEQ ID NO: 2380

SEQ ID NO: 2409 - DNA, 34 bp, Homo sapiens; identical to SEQ ID NO: 2342

SEQ ID NO: 2410 - DNA, 31 bp, Homo sapiens; identical to SEQ ID NO: 2347

SEQ ID NO: 2411 - DNA, 34 bp, Homo sapiens; identical to SEQ ID NO: 2367

SEQ ID NO: 2412 - DNA, 31 bp, Homo sapiens
ttcggcgcagggaccaaggtggaaatcaaac

SEQ ID NO: 2413 - DNA, 34 bp, Homo sapiens
tggggccagggaagcctggtcaccgtctcctcag

SEQ ID NO: 2414 - DNA, 31 bp, Homo sapiens; identical to SEQ ID NO: 2339

SEQ ID NO: 2415 - DNA, 33 bp, Homo sapiens; identical to SEQ ID NO: 2371

SEQ ID NO: 2416 - DNA, 31 bp, Homo sapiens; identical to SEQ ID NO: 2380

SEQ ID NO: 2417 - DNA, 34 bp, Homo sapiens; identical to SEQ ID NO: 2342

SEQ ID NO: 2418 - DNA, 33 bp, Homo sapiens; identical to SEQ ID NO: 49

SEQ ID NO: 2419 - DNA, 31 bp, Homo sapiens; identical to SEQ ID NO: 2337

SEQ ID NO: 2420 - DNA, 34 bp, Homo sapiens; identical to SEQ ID NO: 2342

SEQ ID NO: 2421 - DNA, 31 bp, Homo sapiens; identical to SEQ ID NO: 2380

SEQ ID NO: 2422 - DNA, 34 bp, Homo sapiens
tggggacagggaatcctggtcaccgtctcctcag

SEQ ID NO: 2423 - DNA, 31 bp, Homo sapiens
ttcggccaggggaccaaggtggaaatcaaac

SEQ ID NO: 2424 - DNA, 31 bp, Homo sapiens
tttggccaggggaccaagctggagatcacac

SEQ ID NO: 2425 - DNA, 34 bp, Homo sapiens
tggggcaagggaatcctggtcaccgtctcctcag

SEQ ID NO: 2426 - DNA, 31 bp, Homo sapiens; identical to SEQ ID NO: 2339

SEQ ID NO: 2427 - protein, 119 aa, Homo sapiens
VQLVQSGAEVKKPGSSVKVSCKTSGGTFSSYAISWVRQAPGQGLEWMGGIIGMFGTTNYAQKFQGRVTITADEISSTAYMELSSLRSEDTAVYYCARGMYYYESYLQHWGQGTLVTVSS

SEQ ID NO: 2428 - protein, 86 aa, Homo sapiens
ISWVRQAPGQGLQWMGGIIPSFATTKYAQKFRERVIITADESTTTAYMELGGLTSDDTAVYHCTVGDVVHYGLDVWGKGTPVIVSS

SEQ ID NO: 2429 - protein, 105 aa, Homo sapiens
LTCAVSGASIRNYYWSWIRQPPGKGLEWIGSIYYSGNIYYNPSLKSRVTLSIDTSKSQVSLRLSSVTAADTAMYYCATRGTIGPFSYYYYYMDVWGKGTTVTVSS

SEQ ID NO: 2430 - protein, 90 aa, Homo sapiens
  MOD_RES (37)..(37): Any amino acid
YAMHWVRQVPGKGLEWVSGISWNSNFLDYADSVKGRXTISRDDAKNSLYLEMNSLRLEDTAFYYCAKGDSPNMEYAFDSWGQGTLVAVTS

SEQ ID NO: 2431 - protein, 112 aa, Homo sapiens
  MOD_RES (1)..(3): Any amino acid
XXXGRSLRLSCEASGFIFSSFAMHWVRQAPGKGLEWVALISFDGGRTFSADSVKGRFTISRDNSKNTVFLHMNSLRPADTAVYFCARQRGYNYGAKMYFDFWGQGIRVTVSS

SEQ ID NO: 2432 - protein, 103 aa, Homo sapiens
LRLSCAASGFTLSSYGMHWVRQAPGKGLEWVALIWFDGSNKYYTDSVKGRFIISRDHSKNTLYLQMNSLRAEDTAVYHCARALRGGLTCLDFWGQGTLVTVSS

SEQ ID NO: 2433 - protein, 86 aa, Homo sapiens
  MOD_RES (2)..(2): Any amino acid
  MOD_RES (8)..(9): Any amino acid
  MOD_RES (22)..(22): Any amino acid
PXEGLEWXXEINQSGSTTYNPXLKSRVTLSVDTSKNQFSLRLTSVTAADTAVYYCVRGLNQRASIFGDVRYWFDPWGQGALVTVSS

SEQ ID NO: 2434 - protein, 104 aa, Homo sapiens
SCAATGFTFSGSSIHWVRQAPGKGLEWVGRIRSKYNDLATAYTESVKGRFTISRDDSKNTAYLQMNSLRIEDSAVYYCTRANIITAGSSTFDYWGQGTLVTVSS

SEQ ID NO: 2435 - protein, 105 aa, Homo sapiens
RLSCVASGFAFNTYAMHWVRQAPGKGLEWVALMSFYGTTTYEADSVKGRFTISRDNSKNTLYLQMNSLRPEDTAVYFCARDITIFGVARWTFDSWGQGTLVTVSS

SEQ ID NO: 2436 - protein, 110 aa, Homo sapiens
LRLSCAASRFNFNNYAMHWVRQAPGKGLEWVAVVSADGTYTNYGDSMKGRVTVSRDNLKKTMYLQINSLRPEDTAMYYCGKDIKWTYFDSSTYYDGDGFDFWGQGTMVTV

SEQ ID NO: 2437 - protein, 105 aa, Homo sapiens
LTCTVSGASIRSYYWSWIRQPPGKGLEWIGSIYYSGNINYNPSLKSRVTLSVDTSKSQFSLKLNSVTAADTAMYYCATRGTIGPFSYYYYYMDVWGKGTTVTVSS

SEQ ID NO: 2438 - protein, 100 aa, Homo sapiens
GYSVTSYWIGWVRQMPGKGLEWMGVIHPGNSESRYSPSFQGQVTMSADKSINTAYLEWSSLKASDTAMYYCARGPWFGMSLYAARSFDVWGQGTLVTVSS

SEQ ID NO: 2439 - protein, 117 aa, Homo sapiens
EVQLVESGGGWVQPGGSLRLSCEASGFTFSLYWMGWVRQAPGKGLEWVATMNQDGSDNYYVDSVKGRFTISRDNAKNSLYLQMNSLRAEDTAVYYCARDFDRGAEHWGHGTLVTVSS

SEQ ID NO: 2440 - protein, 126 aa, Homo sapiens
QVQLVESGGGVVRPGGSLRLSCEASGFTLNNYGMHWVRQAPGRGLEWVAVMWAGGRNRFYADSVKGRFTISRDDSKNTLSLQMHSLRAEDTGVYYCLREPREGGGGNAFYWYFDLWGRGTLVTVSS

SEQ ID NO: 2441 - protein, 128 aa, Homo sapiens
VQLVQSGAEVKKPGASVKVSCKASGYTFRNFDINWVRQAPGQGLEWMGWMNPNNGDTGYAEKFRGRVSMTRDTSRNTAFMELRGLTSEDTAIYYCARGLGNRITIYGVLVTRNWLDPWGQGSLVTVSS

SEQ ID NO: 2442 - protein, 106 aa, Homo sapiens
ISCKVSGYSFTSYWIGWVRQMPGKGLEWMGIIYPDDSDTKYSPTFQGQVTISADKSISTAYLQWSSLKASDTAMYYCARSDDCTNGVCYTRHFDYWGQGTLVTVSS

SEQ ID NO: 2443 - protein, 106 aa, Homo sapiens
TLSLTCAVSGGSISRGGFTWSWIRQPPGKALEWIGYIYQSGSTYYSPSLKSRVNISLDKSNNRFFLNVMSVTAADTAVYYCARHETSPGGDYFNHWGQGSLVTVSS

SEQ ID NO: 2444 - protein, 127 aa, Homo sapiens
EVQLVESGGGLVQPGGSLRLACTASGSIFTIPWMGWVRQAPGKGLEWVANINQDGSDTTFLGPVKGRFTISRDNTKNSVFLQMNVLRDEDSAIYYCASLKHNDCFSFGCPHWYLDLWGRGVLVTVSS

SEQ ID NO: 2445 - protein, 93 aa, Homo sapiens
KGLEWIGEINHSGSTNYNPSLKSRVTISVDTSKNQFSLKLSSVTAADTAVYYCASSPIVVVPAAPRELYYSPGGYYYYYMDVWGKGTTVTVSS

SEQ ID NO: 2446 - protein, 118 aa, Homo sapiens
EVQLVESGGGVVQPGGSLRLSCAASGFTFNNYWMSWVRQTPGKGLEWVANIKQDGSEKYYVDSVKGRFTMSRDNANNSLYLQMSNLRAEDTAIYYCARDRGIDAFDIWGQGTMVTVSS

SEQ ID NO: 2447 - protein, 127 aa, Homo sapiens
EVQLVESGGGLVQPGGSLRLACTASGSIFNIPWMSWVRQGPGKGLEWVANINQDGSDTTFLGSVEGRFTISRDNARNSVFLQMSVLRVEDTATYYCASLKHDDCYSTACPHWYFDLWGRGALVTVSS

SEQ ID NO: 2448 - protein, 111 aa, Homo sapiens
  MOD_RES (3)..(3): Any amino acid
GGXLRLSCSASGFIFSHYAMNWARQAPGKGLEWVSGVSTSGDRTVYADSVKGRFTISRDNSKNTLYLQMNSLRVEDTALYYCLTDQHDGCTSASCHKMDVWGRGTTVTVSS

SEQ ID NO: 2449 - protein, 106 aa, Homo sapiens
LRLSCAASGFTFRDFYMSWIRQVPGKGLEWVSYISGSGNAKYHADSVRGRFTISRDNAKDSLFLQMNNLRVDDTAVYYCARYVGNRGPTSYYFDYWGQGTLVTVSS

SEQ ID NO: 2450 - protein, 88 aa, Homo sapiens
WSWVRQPPGKGLEWLGYLYYSGTTSYNPSLKSRVTMSADTSKRQLSLRLTSVTSADTAVYYCARVGMSDGYYYVFDSWGQGTLVTVSS

SEQ ID NO: 2451 - protein, 101 aa, Homo sapiens
  MOD_RES (17)..(17): Any amino acid
  MOD_RES (21)..(21): Any amino acid
RLSCATSGFTFSGYWMXWVRXAPGKGLEWVATIKRDGSAKYYVDSAKGRFTISRDNTKNSVDLHMRSLTVEDTALYYCARAGDWDYNPHFASWGHGTLVTV

SEQ ID NO: 2452 - protein, 101 aa, Homo sapiens
KVSCTASGYTFNMHYIHWVRQAPGQGLEWMGFIDPSGDSRSYSQKFQGRVTLTSDTSTSTVYMELRTLRSDDTAVFYCARIRRGTSGYDYWGQGTLVTVSS

SEQ ID NO: 2453 - protein, 102 aa, Homo sapiens
VSCKASGYTFTTYSMNWVRQAPGQGLEWMGWINTYTGNPTYAQAFTGRFVFSLDTSVSTAFLQITSLKADDTAIYYCATRGPVVLGEALAYWGQGALVTVSS

SEQ ID NO: 2454 - protein, 106 aa, Homo sapiens
LTLSCVGSGFIFSNYAIHWVRQAPGKGLDWVSGVTDDESYKSYANSVKGRYTISRDNSRNTVYLHMDSLRPEDTAIYYCTNGLTGPAYVNAEFEFWGQGTLVTVSS

SEQ ID NO: 2455 - protein, 112 aa, Homo sapiens
LRLSCEASGFTFSNSAMSWVRQAPGKGLEWVSSISGGGHSTYYADSVKGRFSISRDNSKNTLYLQLNSLRAEDTAIFYCVKVSGYASGWLAPFGPVGHLSHWGQGTLVTVSS

SEQ ID NO: 2456 - protein, 84 aa, Homo sapiens
  MOD_RES (4)..(5): Any amino acid
RQPXXKGLEWLAYIHYSGSTSYSPSLKSRITMSVDTSKSQFSLKLNSVTAADTAVYYCVGQGKTNWGWTGMPYWGRGTLVTVSS

SEQ ID NO: 2457 - protein, 98 aa, Homo sapiens
RLSCAASGFSFSTYWMNWVRQIPGKGLEWVANIKQDGSEKYYVDSVKGRFTISRDNAKNSLYLQMNSLRVEDTAVFYCVGGSRSFDIWGQGTMVTVSS

SEQ ID NO: 2458 - protein, 130 aa, Homo sapiens
QVQLQESGPGLVKPSETLSLICSVSGGSVTSGIYHWTWIRQPPGKGLEWIGYIHYSGSTFYNPSLKSRVTISLNAAKNHFSLRLSSVTAADTAVYYCARQVFYDNDDSDGLGYYYGLDVWGIGTTVTVSS

SEQ ID NO: 2459 - protein, 103 aa, Homo sapiens
VSGESLSGYFWNWIRQSPGKGLEWIGEISQSRVTTYNPSLGGRVYFSVDTSKNQFSLNLNSVTAADTAVYYCARGLNQRSSIFGVVRHCFDPWGQGTQVIVSS

SEQ ID NO: 2460 - protein, 107 aa, Homo sapiens
SVRVSCKDSEDTFSTYVMHWVRQAPGQGLEWMGELVPVYGTPNYAQAFQDRITISADESTNTAYLELSSLTSEDTAVYYCARGEGYAGVPTPNWFDPWGQGTLVIVS

SEQ ID NO: 2461 - protein, 118 aa, Homo sapiens
EVQLVESGGGLVRPGGSLRLSCAPSGFTFSHYWVAWLRQAPEKGLEWLAQINQDGREKHYVDSVRGRFTISRDNAKNSLYLQMNSLRVEDTALYYCSRDVDGGYFDYWVQGTLVTVSS

SEQ ID NO: 2462 - protein, 107 aa, Homo sapiens
SVRVSCKTSEDTFSTYVMHWVRQAPGQGLEWMGELVPIYGTPNYAQAFHDRITITADESTSTAYLEMTSLTSEDTAVYYCARGEGYAGVPTPNWFDPWGQGTLVIVS

SEQ ID NO: 2463 - protein, 107 aa, Homo sapiens
LRLSCAASGFTFSSYGMHWVRQAPGKGLEWVSLIWFDGGTKYYADSVKGRFTISRDNSKNTLYLQMNSLRAEDTAVYYCAKDGPTSAHYVQWDFDYWGQGTLVSVSS

SEQ ID NO: 2464 - protein, 100 aa, Homo sapiens
LTCTVSGASITNADSWWNWIRQSPGKGLEWIGYIYYSGNTYYNPSLRSRASISVDTSKNEFFLSLTSVTAADTAVYYCARGGVWFGSLRWGRGTLVTVSS

SEQ ID NO: 2465 - protein, 105 aa, Homo sapiens
SGFSFSNYGMHWVRQAPGKGLEWVAVISHDGSNEDYADSVKGRFTISRDNSKNNLYLQMNRLRAEDTAVYYCAKEYICSGGTCYSFRSYYYMDVWGKGTTVTVSS

SEQ ID NO: 2466 - protein, 95 aa, Homo sapiens
KASGYTFTGYYVHWVRQAPGQGLEWMGWINPNSGGTNYAQRFQGRVTMTRDTSFSTVYMEVNRLRSDDTAVYYCARLRDAYSDYWGQGTWVTVSS

SEQ ID NO: 2467 - protein, 104 aa, Homo sapiens
LRLSCSASGFTFDDSAIHWVRQPPGKGLEWVSSISWNSDTIYYADSVKGRFTISRDNTKNSLYLQMTSLTSEDTALYFCAKDGLRYFGFYLDSWGQGTQVTVSS

SEQ ID NO: 2468 - protein, 105 aa, Homo sapiens
LRLSCAASGFTFEHYAMHWVRQAPGKGLEWVSLITGDGSDTFYSDSVKGRFTISRDNNKNSLYLQMYSLSSEDTALYFCAKDSSPGYFFYGMDVWGQGTTVTVSS

SEQ ID NO: 2469 - protein, 79 aa, Homo sapiens
  MOD_RES (5)..(6): Any amino acid
  MOD_RES (17)..(17): Any amino acid
  MOD_RES (19)..(19): Any amino acid
  MOD_RES (28)..(28): Any amino acid
  MOD_RES (30)..(30): Any amino acid
  MOD_RES (33)..(35): Any amino acid
  MOD_RES (37)..(37): Any amino acid
  MOD_RES (43)..(43): Any amino acid
  MOD_RES (47)..(47): Any amino acid
  MOD_RES (49)..(50): Any amino acid
  MOD_RES (56)..(56): Any amino acid
  MOD_RES (78)..(78): Any amino acid
KGLEXXSYISSRGDTIXYXDSVKGRFTXSXDNXXXSXYLQMNXLQAXDXXVYYCAXMGWLLVASYYFDHWGQGTLLTXS

SEQ ID NO: 2470 - protein, 110 aa, Homo sapiens
RLSCAASGLIFSNYYMSWIRQAPGKGLEGVSYISGSATIIYYADSVKGRFTISRDNPRNSLYLQMNSLRAEDTAVYYCARVARICTNGACYEGAYYFDNWGQGTLVTVSS

SEQ ID NO: 2471 - protein, 113 aa, Homo sapiens
LRLSCAASGFTFDDYAMHWVRQAPGKGLEWVSGISWNSGSRVYADSVKGRFTISRDNAKTSLYLQMNSLRPEDTALYYCVKDKGYSSGYDDVAGYYWYTMDVWGQGTTVTVSS

SEQ ID NO: 2472 - protein, 106 aa, Homo sapiens
  MOD_RES (4)..(4): Any amino acid
RLSXAASGFTFRVYGFHWVRQAPGKGLEWVAAISSDGSNKYYADSVKGRFVISRDNSENTLYLQMDSLRPEDTAVYYCAKTRRITATRYYYGMDVWGRGTTVAVSS

SEQ ID NO: 2473 - protein, 97 aa, Homo sapiens
YTFTTYWLGWVRQMPGEGLEWMGIIYPGDSHTRYSPSFQGQVTLSADTSTNTAYLHWFSLKASDTAIYYCVRRERPLRSGRAPFDTWGQGTAVVVSS

SEQ ID NO: 2474 - protein, 77 aa, Homo sapiens
WVAVISSDGSNKYYADSVKGRFTISRDNSKNTLYLQMNSLRSEDTAVYSCAKGSRYITIFGANPPDYWGQGTLVTVS

SEQ ID NO: 2475 - protein, 92 aa, Homo sapiens
YCGWIRQPPGKGLEWVGSIDYTGNTYYNPSLKSRVTISEDTSKNQFSLKMTSVTAADTAVYYCARSRQRGYSSYDKGDFDYWGQGTLVTVSS

SEQ ID NO: 2476 - protein, 72 aa, Homo sapiens
GSTIYYADSVKGRFTISRDNAKKSVYLEMNSLRAEDTAVYYCARDFHNTIFGVVIPRYFDLWGRGTLVTVSS

SEQ ID NO: 2477 - protein, 105 aa, Homo sapiens
LRLSCAASGFTFNDYAMHWVRQAPRKGLEWVSTVNWNSGDIGYADSVKGRFTISRDNAKKSLFLQMNSLRPEDTAFYYCVKHSVGYAGSGSFDSWGQGTLVTVSS

SEQ ID NO: 2478 - protein, 102 aa, Homo sapiens
  MOD_RES (5)..(5): Any amino acid
RLSCXASGFIFDDYAMYWVRQAPGKGLEWVAGINWKSNNLGYADSVKGRFTISRDSAKKSLYLQMNSLRSEDTATYYCAKDRSGYFYALHFWGQGTLVTVSS

SEQ ID NO: 2479 - protein, 107 aa, Homo sapiens
WGVLRLSCAASGFIFTSYWMHWVRQAPGKGLVWVSRIKSDGRDISYADSVKGRFTVSRDNAKNTVYLQMNSLRAEDTAVYYCARCPVATPGRGVDYWGQGTLVTVSS

SEQ ID NO: 2480 - protein, 105 aa, Homo sapiens
LRLSCAASGFSFEEYGMHWVRQAPGKGPEWVSFINWNSGDIGYADSVEGRFTISRDNAKNSLFLQMNSLRTEDTALYYCVKHNLGYSGSGTFDYWGQGTLVTVSS

SEQ ID NO: 2481 - protein, 96 aa, Homo sapiens
SFAISWVRQAPGQGLEWMGGITAMFGTAFYAQRFQDRLTITADKPTDKFMSTVSMELRSLTSEDTAVYYCARGATYRSSSGYWEYWGQGTLVTVSS

SEQ ID NO: 2482 - protein, 104 aa, Homo sapiens
LRLSCAASGFSFSSYGMHWVRQAPGKGLEPVAIIAYDGSNKYYADSVRGRFTVSRDNSKNTLYLQMNSLRTEDTAVYYCAKDPSYGSGSYSQYWGQGTLVTVSS

SEQ ID NO: 2483 - protein, 103 aa, Homo sapiens
  MOD_RES (4)..(4): Any amino acid
  MOD_RES (60)..(60): Any amino acid
LTCXVSGDSISSGGYYWNWIRQSPGKGLEWIGYIYFTGKTNYNPSLKSRVTISVDPSKTXFSLKLTSVTAADTAVYYCARDRHDYGEDPFDIWGQGTMVTVSS

SEQ ID NO: 2484 - protein, 104 aa, Homo sapiens
LRLSCSASGFTFDDAAMHWVRHRPGKGLEWVSSISWNSDTIHYADSVKGRFTISRDNAKNSVYLQMSRLTSEDTALYFCAKDGLRYFGFYLDSWGPGTHVTVSS

SEQ ID NO: 2485 - protein, 104 aa, Homo sapiens
  MOD_RES (17)..(17): Any amino acid
LRLSCVASGFTFSKYGXDWVRQAPGKGLEWVSGISASGGRTYYADSVKGRFTISRDNSRDTFFLQMNSLRNDDTAIYYCTREAGLWPEPYYFDSWGQGTLVTVS

SEQ ID NO: 2486 - protein, 104 aa, Homo sapiens
LTCTVSGGSISGGNYYWTWIRQPAGKGLEWIGRIYPSGSTNYNPSLKSRVTISVDTSKNHFSLNLSSVTAADTAVYYCARQPGRDSSGYYLDSWGQGTLVTVSS

SEQ ID NO: 2487 - protein, 109 aa, Homo sapiens
RLSCAASGFTFSSDGMHWVRQAPGKGLEWVAFIRYDGSKKYYADSVKGRFTISRDNSKSSLYLQMNSLRTDDTAVYYCAKRSADCSSTSCSGGSWFDPWGQGTLVTVSS

SEQ ID NO: 2488 - protein, 103 aa, Homo sapiens
LRLSCAASGFTFSDYYMSWIRQAPGKGPEWISSISSSSTTKSYADSVKGRFTISRDNAQNSLFLHMNSLRADDAAVYFCARTIGIVTTYFEYWGQGTLVAVSS

SEQ ID NO: 2489 - protein, 113 aa, Homo sapiens
  MOD_RES (1)..(1): Any amino acid
XLELSEVSCKTSGYTFTRYFIHWVRQAPGQGLEWMGMINPRNPRGGSTSYAQNLQGRVTLTSDTSTSTVYLELSSLKSEDTAVYHCARDRGDVLVAQGAIGYWGQGTLLTVSL

SEQ ID NO: 2490 - protein, 110 aa, Homo sapiens
  MOD_RES (4)..(4): Any amino acid
  MOD_RES (21)..(21): Any amino acid
AELXTLSLTCNVSGGSITTGXYYWAWIRQPAGKGLEWVGRIFITGSTDYNPSLKSRVTISLDTSKNQFSLKLTSVTAADTAVYFCARLHYSTTWHYFDPWGQGTLVTVSS

SEQ ID NO: 2491 - protein, 109 aa, Homo sapiens
AGGLRLSCVASGFTFSSYDMNWVRQAPGKGLEWISYISGSGNIIYYADSVKGRFTISRDNAKNSLYLQMNSVRDDDTALYYCARDSEATTTRGRWFDPWGQGTLVTVSS

SEQ ID NO: 2492 - protein, 108 aa, Homo sapiens
LRLSCAASGFTFSSYGMHWVRQAPGKGLEWVAFVRYDGSNICYAASVKGRFTISRDNSKNTVYLQMNSLRADDTAVYYCAKAGDSGSSHCYYYYMDVWGKGTTVTVSS

SEQ ID NO: 2493 - protein, 107 aa, Homo sapiens
RLSCAASGFTFSTYAMSWVRQAPGKGLEWVSTITGNGRTFYADSVKGHFTISRDNSKNMLYLQMNSLRAEDTAVYYCAKNRNYRPSGDFAEGHWLDPWGQGTLVTVS

SEQ ID NO: 2494 - protein, 104 aa, Homo sapiens
RLSCAASGFAFSNYVMAWVRQAPGKGLEWVSNIVGSGDSTYYADSVKGRFSISRDNSNNTLTLQMHSLRAEDTAIYYCTKVDSSPFFDYGMDVWGHGTTVTVSS

SEQ ID NO: 2495 - protein, 107 aa, Homo sapiens
LRLSCAASGFTFSRYWMSWVRQTPGKGLEWVANIDEDGRDKYYVDSVKGRFSISRDNAKNSLHLQMSNLRAEDTAVYYCARDLLKPPNIDPTVKGLWGQGTLVTVSS

SEQ ID NO: 2496 - protein, 112 aa, Homo sapiens
LRLSCTASGFTFGDYALSWVRQAPGKGLEWVGFIRSKAYGGTTEYAASVKGRFTISRDDSKSIAYLQMNSLKTEDTAVYYCTRDIRGGYSYGYFVPYYFDYWGQGTLVTVSS

SEQ ID NO: 2497 - protein, 104 aa, Homo sapiens
LTCTVSSYSITSGYYWGWVRQPPGKGLEWIASIYHSGSTYYNMSLKSRVTISVDTSKNQFSLKLTSVTAADTAVYYCARMGFVGSFTSGTYIDYWGQGSLVPVS

SEQ ID NO: 2498 - protein, 102 aa, Homo sapiens
VSCKASGYTFTSYGISWVRQAPGQGLEWMGWISTKNVNTNYAQKLQGRVTMTADTSTSTAYMDLRTLRSDDTAVYFCARIHDFRSGFPLDYWGQGTLVTVSS

SEQ ID NO: 2499 - protein, 109 aa, Homo sapiens
VSCEASGYRFTDYYIVWMRQAPGQGLERMGRINPQSGGTDVPQKFQGTVTLTRDTSISTAYMELSSLRSDDTALYFCARDDCSITTCRVPNQDHAFDIWGQGTMVIISS

SEQ ID NO: 2500 - protein, 103 aa, Homo sapiens
LTCTVSGASISSYYWNWIRQPPGKGLEWIGYIYHTGSTNSNPSLKSRVTISVDTSKNQFSLKLSSVTAADTAVYYCARAAWRDGNDGYFLDYWGQGTLVTVSS

SEQ ID NO: 2501 - protein, 104 aa, Homo sapiens
SGTLSLTCAVSGASVTSNNWWIWVRQPPGKGLEWIGEIWHSGRTNYNSSLKSRLSISVDIFKHQFSLNLNSLTAADTAVYYCAKRGDWLWYFDVWGPGIPVTVS

SEQ ID NO: 2502 - protein, 111 aa, Homo sapiens
LTCIVSGDSIITSTYYWGWIRQSPGKGLEWIGSINSGGRTTYGPSLDGRVTMSVDTSNNQLSLKLRSVTAADTAVYYCARLVPAEPSGPGNYFYYFFMDVWGKGTTVTVAS

SEQ ID NO: 2503 - protein, 61 aa, Homo sapiens
IYYADSVKGRFTISRDNAKNSLYLQMNSLRAEDTAVYYCARGTTATGMDVWGKGTTVTVSS

SEQ ID NO: 2504 - protein, 100 aa, Homo sapiens
RLSYEVSGFTVSSNFMSWVRRAPGKGLEWVSVIYSGGGTYYGDSVKGRFTISRDTSRNSLSLQMNSLSVEDTGIYYCARVGRRSWYVDYWGHGTLVTVSS

SEQ ID NO: 2505 - protein, 97 aa, Homo sapiens
LRLSCAASGFIFSEYWMQWVRQTPGKGLEWVANIHPGGNERYHVDSVRGRFTISRDNAKNSLYLQMNSLRAEDTAIYYCTRGDPDYWGQGTLVTVSS

SEQ ID NO: 2506 - protein, 105 aa, Homo sapiens
LTCAVSGSSISRGYYWAWIRQPPGKGLEWIGSIYHSVNTYYNPSLKSRVTVSVDTSKNQLSLRLTSVTAADTAMYYCARKVRGSSPDPLYYFDYWGQGTPVTVSS

SEQ ID NO: 2507 - protein, 105 aa, Homo sapiens
LRLSCVGSGFTFHYAWMSWVRHSPGKGLEWVGRVKSQSDGGAADYGAAVKGRFTISRDDSKNTVFLQMNSLRTEDTGVYYCTRNSPITVFGVGPWGQGTLVTVSS

SEQ ID NO: 2508 - protein, 101 aa, Homo sapiens
VSCKGSGGSFNNFAINWVRQAPGQGLEWMGGISPIFGAVHHAQKFQGRVTITADIFTSTAYMELSSLGSEDTAIYYCARGLNYYYYHGMDVWGQGTTVIVS

SEQ ID NO: 2509 - protein, 104 aa, Homo sapiens
SVRVSCKGSGGDFNNFAINWVRQAPGQGLEWMGGISPIFGGVKHAQKFQGRVTITADIFARTVYMDLSNLGSDDTAIYFCARGLNYYYYHGMDVWGQGTTVIVS

SEQ ID NO: 2510 - protein, 105 aa, Homo sapiens
RLSCAASGFTFSTYAMSWVRQAPGKGLEWVSGISGSGDDTYYADSVKGRFTISRDNSKNTVYLEMSSLRAEDTAVYFCAKLRRGVMLIKYYFDFWGQGTLVTVSS

SEQ ID NO: 2511 - protein, 109 aa, Homo sapiens
  MOD_RES (1)..(2): Any amino acid
XXGGSLRLSCAASGFNLHSYEMYWVRQAPGKGLEWVSFISSRSDAIYYAGSVQGRFTISRNNAANTLYLQMNSLRVEDTALYYCARDAGRFLAYGMDVWGQGTTVTVSS

SEQ ID NO: 2512 - protein, 85 aa, Homo sapiens
TFTDFYMTWIRQGPGEGLEWISYMNSGGSVIRYADSVKGRFTIYRDNAKKSVHLEMNSLRPDDTAVYYCATGYGFVGPLAYWGQG

SEQ ID NO: 2513 - protein, 97 aa, Homo sapiens
  MOD_RES (3)..(3): Any amino acid
  MOD_RES (13)..(13): Any amino acid
CAXSGFTFTNAWXNWIRQAPGKGLEWVARIKRKIEGEATDYAAPVKGRFTISRDDSRYTVHLQMDSLKSEDTAVYYCYGGDTEVRYWGQGTLVTVSS

SEQ ID NO: 2514 - protein, 107 aa, Homo sapiens
SVRVSCKASGAIFNNYAIGWVRQAPGQGLEWMGQSIPLLGTTKYAHKFQGRVTITAEDSGSTTYLDLSRLNFDDTAVYYCVRCFGYSSNTPAYFDYWGQGTLVTVSS

SEQ ID NO: 2515 - protein, 106 aa, Homo sapiens
LRLSCAVSGFPFNNFAMHWVRQAPGKGLQWVSSITSSSNDIYYADSVKGRFTISRDNAKNSLFLQMNSLRTDDTAVYYCARDFRPYDLLTGLFDSWGQGTLVTVSS

SEQ ID NO: 2516 - protein, 101 aa, Homo sapiens
  MOD_RES (1)..(1): Any amino acid
XVSCKASGYRLTRYYMHWVRQAPGQGLEWMGVIDPSGGGTTYAQKFQGRVTMTRDTSTSTVNMQLTSLRSEDTAVYYCATFSQGGLQNDYWGQGTLVTVSS

SEQ ID NO: 2517 - protein, 101 aa, Homo sapiens
LRLSCAASGFTFSTYWMKWVRQAPGKGLECVANIEPDGSQRWHVDSVKGRFTISRDNAKNSLYLQMNSLRGEDTAMYYCAIVSRSFVMDVWGHGTTVTVSS

SEQ ID NO: 2518 - protein, 105 aa, Homo sapiens
LRLSCTASGFSFSDSEMNWVRQAPGKGLEWVAYIFASGSTLFYADSVKGRFTISRDNAKNSLYLQMNSLRGEDTAVYYCAKTLRKRNGYSGPIDSWGQGTLVTVS

SEQ ID NO: 2519 - protein, 102 aa, Homo sapiens
LTCTVFGGSISTHYWSWIRQTPGKGLECIGYISDSGRTNYNPSLKSRVTISIDTSKNQFSLKLRSVTAADTAVYFCARDDTGISKKNAFDIWGQGTLVTVSS

SEQ ID NO: 2520 - protein, 107 aa, Homo sapiens
VSCRASDYTFTSYGINWVRQAPGQGLEWMGWISSYNGNKHYVQKFQGRVTMTTDTSTNTAYMELRSLRSDDTAVYYCARDNLPSLYGDYDRNAFDIWGQGTMVTVSS

SEQ ID NO: 2521 - protein, 103 aa, Homo sapiens
VRVSCKASGGAFRNFAISWVRQAPGQGLEWMGGITAIFGTTNYAQKFQGRLTITADESTSSTYMELSSLRSEDTAVYYCAKGRNYYVDYFDYWGQGSLVTVSS

SEQ ID NO: 2522 - protein, 105 aa, Homo sapiens
  MOD_RES (2)..(4): Any amino acid
IXXXSCKGSGRNFNNFAINWVRQAPGQGLEWMGGISPIFGAVKHGQEFQGRVTFTADVFTSTVYMELSSLGSEDTAIYYCARGLNYYYYHGMDVWGQGTTVIVSS

SEQ ID NO: 2523 - protein, 91 aa, Homo sapiens
YWMSWVRQAPGRRPEWVAKIKHDGSEKYYVGSVQGRFIISKDNAKNFLYLQMDRLRADDTAVYYCARDSRIVPTNYYYDFWGQGTQVNVSS

SEQ ID NO: 2524 - protein, 101 aa, Homo sapiens
RLSCAVSGLSFSDYFMGWIRQAPGKGPEWLSYISSSGYTIFYADSVKGRFTISRDNSKNSLYLQMNSLTAEDTAVYYCARDPGGSSSFDYWGQGTLVTVSS

SEQ ID NO: 2525 - protein, 75 aa, Homo sapiens
ISGSGTYIYYADSVRGRFTISRDNAKTSLYLQMNSLRAEDTAVYYCARVRCGGLCYSSDWYFDVWGRGTLVTVSS

SEQ ID NO: 2526 - protein, 98 aa, Homo sapiens
VSCKASGGTFNNFAINWVRQAPGQGLEWMGGISPIFGAGKHAQKLQGRVTITADVFTSTVYMELGSLRSEDTATYYCARGLNYYFYHGMDLWGQGTTV

SEQ ID NO: 2527 - protein, 101 aa, Homo sapiens
SVRVSCKGSGGDFNNFAINWVRQAPGQGLEWMGGISPIFGAVKHAQKFQGRLTITADVFVKTAYMELSSLGFEDTAIYYCAKGLNYYYYHGMDVWGLGTTV

SEQ ID NO: 2528 - protein, 110 aa, Homo sapiens
LRLSCAASGFAFSSYGMTWVRQAPGKGLEWVSAISGSGGSTWYADSVKGRFTISRDNSQSTLFLQMHGLRADDTAIYYCAKDTATVTTSLYFYYHGMDVWGQGTTVTVSS

SEQ ID NO: 2529 - protein, 106 aa, Homo sapiens
LRLSCAASGFTFTTSAMSWVRRAPGKGLEWVSTISGIGDTTYYADSVKGRFTISRDNSKKSLYVQLDSLRAEDTAVYYCAKSQGPFYSDYVYFESWGQGAPVTVSS

SEQ ID NO: 2530 - protein, 108 aa, Homo sapiens
LRLSCAASGFSFSSYWMTWVRQAPGKGLEWVANINQDGSEKDYVDSVKGRFTISRDNAQNSLFLQMDSLRVEDTALYYCAREGSYGDTYHSYYGMDVWGQGTTVTVSS

SEQ ID NO: 2531 - protein, 123 aa, Homo sapiens
EVQLVESGGGLVKPGGSLRVSCAASGFTFSAAWMNWVRQTPGKGLEWVGRIWSKSDGLTTQYAAPVQGRFTISRDDSKNTLYLQMNSLKTEDTAVYYCTADLSTSSGHYFDYWGQGTLVTVSS

SEQ ID NO: 2532 - protein, 102 aa, Homo sapiens
LRLSCAASGFIFSNYWMTWVRQAPGKGLEGVANIKQDGSETYYVDSVKGRFTISRDNAQNSLYLQMNSLRAEDTAVYFCARHSYALPPRDYWGQGTLVTVSS

SEQ ID NO: 2533 - protein, 95 aa, Homo sapiens
SGGSMSPFYWNWIRQSPGKGLEWIGYVYYAGGTRYNPSLKSRVTITEDTSKNQFSLKLRSVTAADTAVYYCARGGGWLQSDFDIWGQGALVTVSS

SEQ ID NO: 2534 - protein, 114 aa, Homo sapiens
  MOD_RES (3)..(3): Any amino acid
SMXLGDVSCKASGGTFTNYAFSWVRQAPGQGLEWMGGIIPIFGTTNYAQRFQGRVTITADESTSTAYMELSSLRSEDTAVYYCASSSGWPSDRYFHHYSGLDVWGQGTTVTVSA

SEQ ID NO: 2535 - protein, 104 aa, Homo sapiens
RGGESLKISCQGLGYNFAGYWFGWVRQRPGYGLEWMGTIYPGDSSTRYNPSFQGQISISADDSTTTAYLQWPSLKASDSGTYYCAGHTSTTNFWGRGTLVTVSS

SEQ ID NO: 2536 - protein, 101 aa, Homo sapiens
VSCKASGYTFTGYFIHWVRQAPGQGLEWMGWINPNSGGANSAQKFQGRVTMTRDTSITTAYMDLTRLTSDDTAVYYCARGDCTSTSCYVHWGQGTLVTVSS

SEQ ID NO: 2537 - protein, 84 aa, Homo sapiens
  MOD_RES (3)..(3): Any amino acid
  MOD_RES (8)..(8): Any amino acid
  MOD_RES (10)..(10): Any amino acid
  MOD_RES (13)..(14): Any amino acid
  MOD_RES (21)..(21): Any amino acid
  MOD_RES (27)..(27): Any amino acid
  MOD_RES (34)..(37): Any amino acid
  MOD_RES (40)..(40): Any amino acid
GLXWLGRXYXLAXXYTDSAVXVKGRIXVNADPSXXXXSLXLNSVTPEDTAVYYCVREGREYGDRFSVPNWYFDLWGRGTQVTVS

SEQ ID NO: 2538 - protein, 111 aa, Homo sapiens
SETLSLTCSVSGVAVNTDLYYWSWVRQAPGKGLEWIGYVYSHGRTNYNPSLKGRVTVSADPSTNTFSLNLMSMTAADKAVYYCARHPSYLAVADGRDAFDIWGQGTMVIVS

SEQ ID NO: 2539 - protein, 124 aa, Homo sapiens
LQESGPGLVKPSETLSLTCTVSGGSISGSGYFWGWIRQPPGEGLEWIGTINYGGTAYYNPSLKSRVAISVDTSKSQVSLRLSSVTAADTAVYYCARQPPITIFGLLRPGWFGSWGQGTLVTVSS

SEQ ID NO: 2540 - protein, 113 aa, Homo sapiens
  MOD_RES (64)..(64): Any amino acid
QPGGSLRLSCAASGFSFSSYWMTWVRQAPGKGLEWVANINQDGSEKDFVDSVKGRFTISRDNAXSSLFLQMNSLRAEDTAVYYCAREGSYGDTYHSYYAMDVWGQGTTVTVSS

SEQ ID NO: 2541 - protein, 102 aa, Homo sapiens
  MOD_RES (8)..(8): Any amino acid
  MOD_RES (31)..(31): Any amino acid
  MOD_RES (45)..(45): Any amino acid
VSSDTAAXNWIRQSPSRGLEWLGRTYYRSKXYNDYAVSVKSRIAXNPETSKNQFSLQLNSVTPEDTAVYYCAREGREYGDRFSVPYWYFDLWGRGTLVTVSS

SEQ ID NO: 2542 - protein, 107 aa, Homo sapiens
SGGSLRLSCVGSGFTFSNYPIRWVRQAPGKGLEWVSSISATGATIYYADSVKGRFTISRDNSKNTVYLQVNSLRAEDTAVYYCARGVFSPAYYFEYWGQGTLVTVSS

SEQ ID NO: 2543 - protein, 120 aa, Homo sapiens
EVQLLESGGGLVQPGGSLRLSCAASGSTSTSFPMSWVRQSPGMGPEWVSSISRDGILTYYKDSVKGRFTLSRDNSKNTLYLEMNSLTTDDTAVYYCAKIAVSGQWYFDLWGRGTLVTVSS

SEQ ID NO: 2544 - protein, 117 aa, Homo sapiens
VQLVQSGAEVKKPGSSVRVSCKASGGTFDTYAFSWVRQAPGQGLEWMGGIVPILGTTDYAQRFQGRVSITADKATTTAYMDLSSLRSEDTAVYYCVVFITPTINYTWGHGTLVTVSS

SEQ ID NO: 2545 - protein, 112 aa, Homo sapiens
SETLSLTCTVSGGSFSSNAYYWDWIRQPPGKGPEWIGSFYYRGTPYNNPSLKSRVTISLDTSKNQFSLKLTSVTAADTAVYYCARLGGTGLNGGDFQYGVDIWGQGTTVTVS

SEQ ID NO: 2546 - protein, 110 aa, Homo sapiens
VSCKASGVTFSSYAISWVRQAPGQGLEWMGGVLPMFNVPKYAQKFQGRVTITADKSTNTAYLELSRLRSEDTAVYYCSRLNPSRRPPPGVPHYYYGMDVWGQGTTVTVSS

SEQ ID NO: 2547 - protein, 63 aa, Homo sapiens
TYYADSVKGRFTISRDNSKNTVYLQIISLRVEDTAVYYCTSCWPILNHYSPRPSSWGQGTLVT

SEQ ID NO: 2548 - protein, 104 aa, Homo sapiens
SVTVSCKASGGTFSSRATSWVRQAPGQGLEWMGGIIPILDKTNYAQKFQGRVTITADRSTSTAYMELSSLRSEDTGMYYCASALRYSFVYGMDVWGQGTTVTVS

SEQ ID NO: 2549 - protein, 120 aa, Homo sapiens
QVQLVESGGGVVQPGRSLRLSCAASGFTFRSFAMNWVRQAPGKGLEWVAGISYDGGNEYYVDSVKGRFTISRDNAKNTLHLQMNSLRAEDTAVYYCVKDAYNSGWHFDYWGQGTLVTVSS

SEQ ID NO: 2550 - protein, 101 aa, Homo sapiens
LRLSCAPSGFTFTHAWMTWVRQAPGKGLEWVGRIKSDRDGGTADYAAPVKGRFTISKDDSKKTVYLQMDSLKTEDTAIYYCTKQTGDFDSWGQGTLVSVSS

SEQ ID NO: 2551 - protein, 99 aa, Homo sapiens
SGFSFSDYYMSWVRQAPGKGLDWVSSISTSGSIINYADSVKGRFIISRDNSKSSLFLDMSDLRVEDSALYYCVSSYCRGNNCYGAPNYWGQGTQVTVSS

SEQ ID NO: 2552 - protein, 112 aa, Homo sapiens
QPGGSLRLSCEASGFIFSSYWMTWVRQAPGKGLEWVANINQDGSEKDYVDSVKGRFTISRDNAKNSLYLQMNSLRAEDTAVYYCAREGSYGDTYHFYYAMDVWGQGTTVTVS

SEQ ID NO: 2553 - protein, 114 aa, Homo sapiens
VQLVESGGGLVQPGRSLRLSCAASGFNFDDYAMHWVWQTPGKGLEWVSGLSGDSGTIGYADSVKGRFTISRDNAKDSLYLQMNSLRTEDTALYYCVTQQSFDLWGRGTLVTVSS

SEQ ID NO: 2554 - protein, 118 aa, Homo sapiens
VQLVQSGAELKKPGASVKLSCKASGYTFSGYYMSWVRQAPGQGLEWMGWILPASGDTKYSQRFQGRVTMTTDTSISTAYMDLKSLTGDDTAVYYCAKILPGIYAFDLWGQGTMVTVSS

SEQ ID NO: 2555 - protein, 91 aa, Homo sapiens
  MOD_RES (15)..(15): Any amino acid
  MOD_RES (21)..(21): Any amino acid
  MOD_RES (23)..(23): Any amino acid
YYWGWVRQPPGKGLXWVGSVXYXGIAHYNPSLTSRVTIDVDRPKNQFSLKLTSVTAADTAVYYCARTGGYSFDYSDYFDFWGQGTLVTVSS

SEQ ID NO: 2556 - protein, 123 aa, Homo sapiens
EVQLVESGGGLVEPGGSLRLSCTGSGFPFINAYFSWVRQAPGKGLEWVARIKRQSSGGTTDYAAPVKGRFTISRDDSKNTVYLQMSSLRTEDTAVYYCAIPPVPYYYYYSDVWGKGTTVTVSS

SEQ ID NO: 2557 - protein, 125 aa, Homo sapiens
QLQESGPGLVKPSETLSLTCTVSGASMNSEAFYWGWIRQSPGKGLESIGSMSYSGTPYYKPSLKSRVSISLDTSKSSFSLKLTSVTAADTAVYFCARQRRVSIFGLLLPGEFDTWGQGALVTVSS

SEQ ID NO: 2558 - protein, 127 aa, Homo sapiens
QLQESGPGLVKPSETLSLTCTVSGGSISSSSYYWGGIRQPPGKGLEWIGSIYYSGSTYDNPSLKSRVTISVDTSKNQFSLKLSSVTAADTAVYYCARHNDHYCSSTSCYPVGYFDLWGRGTLVTVSS

SEQ ID NO: 2559 - protein, 113 aa, Homo sapiens
  MOD_RES (1)..(2): Any amino acid
XXGLKCLLQASGYTFTGYYMHWVRQAPGQGLEWMGWINPNSGGTNYAHKFQGRVTMTRDTSISTAYMELSRLRSDDTAMYYCARALYYYDSSGFPVLYYFDYWGQGTLVTVSS

SEQ ID NO: 2560 - protein, 120 aa, Homo sapiens
QLQESGPGLVKPSETLSLTCTVSGGSISSSSYYWGWIRQPPGKGLEWIGSIYYSGSTYYNPSLKSRVTISVDTSKKQFSLKLSSVTAADTAVYYCARLPRGDTLYYFDYWGQGTLVTVSS

SEQ ID NO: 2561 - protein, 103 aa, Homo sapiens
LRLSCAASGFRFSTFAMSWVRQSPGKGLEWVSAISGPGRGTYYTDSVEGRFTISRDNSKNVVFLQMNSLRAEDTAVYFCAKGANWGSWFLDSWGQGTLVTVSS

SEQ ID NO: 2562 - protein, 110 aa, Homo sapiens
LTCTVSGGSISSSSYYWGWIRQPPGKGLEWIGSIYYSGSTYYNPSLKSRVTISVDTSKNQFSLKLSSVTAADTAVYYCAGRRGYDFWSGYYNYYYGMDVWGQGTTVTVSS

SEQ ID NO: 2563 - protein, 108 aa, Homo sapiens
LRLSCAASGFTFSSYGMHWVRQAPGKGLEWVAVISYDGSNKYYADSVKGRFTISRDNSKNTLYLQMNSLRAEDTAVYYCAKEGWAYCGGDCYSYFDYWGQGTLVTVSS

SEQ ID NO: 2564 - protein, 108 aa, Homo sapiens
SETLSLTCTVSGGSISYYYWTWIRQPPGKGLQWIGFIYDSGSTNYNPSLKSRVTMSVDTSKNQFSLKLSSVTAADTAMYYCARGKRGGNPDFSQRFDPWGQGALVTVS

SEQ ID NO: 2565 - protein, 114 aa, Homo sapiens
LRLSCTTSGFTFGDYAMSWVRQAPGKGLEWVGFIRAKPYGGTTEYAASLKGRFTISRDDSKSVAYLQMNSLKTEDTAVYFCARGGHTAMVTTPYFYYYYGMDVWGQGTTVTVSS

SEQ ID NO: 2566 - protein, 110 aa, Homo sapiens
  MOD_RES (3)..(3): Any amino acid
  MOD_RES (5)..(5): Any amino acid
TLXLXCTVSGGSISSGGYYWSWIRQHPGKGLEWIGYIYYSGSTYYNPSLKSRVTISVDTSKNQFSLKLSSVTAADTAVYYCARAPDDFWSGYWGYYFDYWGQGTLVTVSS

SEQ ID NO: 2567 - protein, 108 aa, Homo sapiens
LRLSCAASGFTFDDYAMHWVRQVPGKGLEWVSLISGDGGSTYYADSVKGRFTISRDNSKNSLYLQMNSLRTEDTALYYCANSEWELLGPSTWWYFDLWGRGTLVTVSS

SEQ ID NO: 2568 - protein, 102 aa, Homo sapiens
GASVKVSCKASGYTFIGYYMHWVRQAPGQGLEWMGWINPNTGGTNYAQKFQGRVTMTRDTSISTAYMELSRLRSDDTAVYYCAREEGGSYFDWGQGTLVTVS

SEQ ID NO: 2569 - protein, 104 aa, Homo sapiens
TVSGGSISSSSYYWGWIRQPPGKGLEWIGSIYYSGNTYYNPSLKSRVTISVDTSKNQFSLKLSSVTAADTAVYYCGRHAVTTWYNWNYHPFDYWGQGTLVTVSS

SEQ ID NO: 2570 - protein, 105 aa, Homo sapiens
LTCTVSGGSISSSSYYWGWIRQPPGKGLEWIGSMYYSGNTYYNPSLKSRVTISVDTSKNQFSLKLSSVTAADTAVYYCARHPVNYGDYVEWFDPWGQGTLVTVSS

SEQ ID NO: 2571 - protein, 103 aa, Homo sapiens
LRLSCAASGFTFSTYGMHWVRQAPGKGLEWVAVIWYDGSNKYYADSVKGRFTISRDNSKNTLYLQMNSLRAEDTAVYYCARDSEGSGWYFDYWGQGTLVTVSS

SEQ ID NO: 2572 - protein, 110 aa, Homo sapiens
LRLSCAASGFKFSDYGMHWVRQAPGQGLQWVAVTSFVGTMKYYADSLKGRFTISRDNSKNTLYLQMNNLRAEDSGVYFCAKVGWSLQWLNLGYSNDMDVWGQGTTVIVSS

SEQ ID NO: 2573 - protein, 108 aa, Homo sapiens
VSCKASGYTFTSYGISWVRQAPGQGLEWMGWISAYNGNTNYAQKLQGRVTMTTDTSTSTAYMELRSLRSDDTAVYYCARSHTSGSYLWRDLPYWFDPWGQGTLVTVSS

SEQ ID NO: 2574 - protein, 116 aa, Homo sapiens
SMRLSCAASGFTFSDYYMSWIRQAPGKGLEWVSYISSSGSTIYYADSVKGRFTISRDNAKNSLYLQMNSLRAEDTAVYYCAREGHRHSSRWRDTGYYYYYYYMDVWGKGTTVTVSS

SEQ ID NO: 2575 - protein, 115 aa, Homo sapiens
  MOD_RES (1)..(2): Any amino acid
  MOD_RES (5)..(5): Any amino acid
XXSFXTLSLTCTVSGGSISSGGYYWSWIRQHPGKGLEWIGYIYYSGSTYYNPSLKSRVTISVDTSKNQFSLKLSSVTAADTAVYYCARDSNEAARGSEYWYFDLWGRGTLVTVSS

SEQ ID NO: 2576 - protein, 114 aa, Homo sapiens
  MOD_RES (1)..(2): Any amino acid
  MOD_RES (103)..(103): Any amino acid
XXESLRISCKGSGYSFTSYWISWVRQMPGKGLEWMGRIDPSDSYTNYSPSFQGHVTISADKSISTAYLQWSSLKASDTAMYYCARQDYYDSSGYSTEYYGMDXWGQGTTVTVSS

SEQ ID NO: 2577 - protein, 109 aa, Homo sapiens
LRLSCAASGFTFSSYGMHWVRQAPGKGLEWVAVISYDGSNKYYADSVKGRFTISRDNSKNTLYLQMNSLRAEDTAVYYCAKDQSGFVLMVYAIHSPGYWGQGTLVTVSS

SEQ ID NO: 2578 - protein, 95 aa, Homo sapiens
RLSCAASGFTFDDYAMHWVRQAPGKGLEWVSLISGDGGSTYYADSVKGRFTISRDNSKNSLYLQMNSLRTEDTALYYCAKDGGDLSQGTLVTVSS

SEQ ID NO: 2579 - protein, 106 aa, Homo sapiens
LRLSCAASGFTFSSYWMSWVRQAPGKGLEWVANIKQDGSEKYYVDSVKGRFTISRDNAKNSLYLQMNSLRAEDTAVYYCAREGSSSWEFYNWFDPWGQGTLVTVSS

SEQ ID NO: 2580 - protein, 119 aa, Homo sapiens
EVQLVESGGGLIQPGGSLRLSCAASGFSVRSNYLTWVRQAPGKGLEWVSVIYSGDSTDYADSVKGRFTFSRDNSKNTVYLQMNSLRAEDTAVYYCAKLMVDLDYYMDVWGKGTTVTVSS

SEQ ID NO: 2581 - protein, 123 aa, Homo sapiens
VQLVQSGAEVKKPGASVKVSCKASGYTFTGYYMHWVRQAPGQGLEWMGWINPNSGGTNYAQKFQGRVTMTRDTAISTAYMELSRLRSDDTAVYYCARDPTPYSNAQLCWFDPWGQGTLVTVSS

SEQ ID NO: 2582 - protein, 104 aa, Homo sapiens
RLSCAASGFTFDDYAMHWVRQAPGKGLEWVSLISGDGGSTYYADSVKGRFTISRDNSKNSLYLQMNSLRTEDTALYYCAKDPLRYSSLYGMDVWGQGTTVTVSS

SEQ ID NO: 2583 - protein, 108 aa, Homo sapiens
  MOD_RES (17)..(18): Any amino acid
SLTCTVSGGSISSGGYXXSWIRQHPGKGLEWIGYIYYSGSTYYNPSLKSRVTISVDTSKNQFSLKLSSVTAADTAVYYCARGQDYDILTRSSYYMDVWGKGTTVTVSS

SEQ ID NO: 2584 - protein, 106 aa, Homo sapiens
SETLSLTCTVSGGSISNYYWTWIRQPPGKGLEWIGNEYYSGSTNYNPSFKSRVTISVDSSKNQFSLKLSSVTAADTAVYYCARESHDYSNYRFFDSWGRGTLVTVS

SEQ ID NO: 2585 - protein, 108 aa, Homo sapiens
ASGYTFTGYYMHWVRQAPGQGLEWMGWINPNSGGTNYAQKFQGRVTMTRDTSISTAYMELSRLRSDDTAVYYCASPLGYCSSTSCYRTYYYYYGMDVWGQGTTVTVSS

SEQ ID NO: 2586 - protein, 106 aa, Homo sapiens
LTCTVSGGSISSSSYYWGWIRQPPGKGLEWIGNIYYSGNTYYNPSLKSRVTISVDTSKNQFSLKLSSVTAADTAVYYCARLTVPSIRSWSSRFDPWGQGTLVTVSS

SEQ ID NO: 2587 - protein, 97 aa, Homo sapiens
LRLSCAASGFTFSSYDMHWVRQATGKGLEWVSAIGTAGDTYYPGSVKGRFTISRENAKNSLYLQMNSLRAGDTAVYYCARDLSMDVWGKGTTVTVSS

SEQ ID NO: 2588 - protein, 100 aa, Homo sapiens
RLSCAASGFTFDDYAMHWVRQAPGKGLEWVSGISWNSGSIGYADSVKGRFTIFRNNAKNSLYLQMNSLRAEDTALYYCSQGDGTVGFHYWGQGTLVTVSS

SEQ ID NO: 2589 - protein, 101 aa, Homo sapiens
RLSCAASGFTFSSYGMHWVRQAPGKGLEWVAVISYDGSNKYYADSVKGRFTISRDNSKNTLYLQMNSLRVEDTAVYYCARIHYGDYFVDSWGQGTLVTVSS

SEQ ID NO: 2590 - protein, 118 aa, Homo sapiens
EVQLVESGGGLVKPGGSLRLSCAASGFIFNNAWMSWVRQPPGKGLQWVGHFKIKADGGTTDYAAPVKGRFTISRDESKNMLYLQMNSLKTEDTAIYYCTTGTTYFDYWGQGTLVTVSS

SEQ ID NO: 2591 - protein, 107 aa, Homo sapiens
LTCTVSGGSISSSNYYWGWIRQPPGKGLEWIGSIYYSGNTYYNPSLKSRVTISVDTSKNQFSLKLSSVTAADTAVYYCARHAVTTWYNWNYHPFDYWGQGTLVTVSS

SEQ ID NO: 2592 - protein, 121 aa, Homo sapiens
EVQLVESGGGLVQPGGSLRLSCAASGFTFSSYPMHWVRQAPGKGLEYVSAISSNGGSTFYANSVKGRFTISRDNSKNTLYLQMGSLSAEDMAVYYCARDGGDEFAEYFQHWGQGTLVTVSS

SEQ ID NO: 2593 - protein, 108 aa, Homo sapiens
LTCTVSGGSISSSSYYWGWIRQPPGKGLEWIGSIYYSGSTYYNPSLKSRVTISVDTSKNQFSLKLSSVTAADTAVYYCASQVGLRVVISYYYYYMDVWGKGTTVTVSS

SEQ ID NO: 2594 - protein, 105 aa, Homo sapiens
LTCTVSGGSISSSSYYWGWIRQPPGKGLEWIGSIYYSGRTYYNPSLKSRVTISVDTSKNQFSLRLSSVTAADTAVYYCARHPVEYSSLAGAFDIWGQGTMVTVSS

SEQ ID NO: 2595 - protein, 124 aa, Homo sapiens
EVQLVQSGVEVKKPGESLKISCKGSGYSFTSYWIGWVRQMPGKGLEWMGVIYPSDSDTRYSPSFQGQVTISADTSISTAYLQWSSLKASDTAMYYCARQGAGDLPYKYYFMDVWGRGTTVTVSS

SEQ ID NO: 2596 - protein, 104 aa, Homo sapiens
  MOD_RES (14)..(14): Any amino acid
  MOD_RES (27)..(27): Any amino acid
LTCTVSGGSISSSXYYWGWIRQPPGKXLEWIGSIYYSGNTYYNPSLKSRVTISVDTSKNQFSLKLSSVTAADTAVYYCARHPVEYSSSSGFDYWGQGTLVTVSS

SEQ ID NO: 2597 - protein, 105 aa, Homo sapiens
LTCTVSDGSISSSSYYWGWIRQPPGKGLEWIGSIYYSGSTYYNPSLKSRVTISVDTSKNQFSLKLSSVTAADTAVYYCASLYYDFWSGYFGGDYWGQGTLVTVSS

SEQ ID NO: 2598 - protein, 106 aa, Homo sapiens
LTCTVSGGSISSGGYYWSWIRQHPGKGLEWIGYIHYSGSTYYNPSLKSRVTISVDTSKNQFSLKLSSVTAADTAVYYCARSTPYNWNSPSPAFDYWGQGTLVTVSS

SEQ ID NO: 2599 - protein, 101 aa, Homo sapiens
  MOD_RES (36)..(36): Any amino acid
LRLSCAASGFTFSRYGMHWVRQAPGKGLEWVAVIWXDGSNKYYADSVKGRFTISRDNSKNTLYLQMNSLRAEDTAVYYCARDRENWYFDLWGRGTLVTVSS

SEQ ID NO: 2600 - protein, 105 aa, Homo sapiens
  MOD_RES (18)..(18): Any amino acid
LRLSCAASGFTFSDYYMXWIRQAPGKGLEWVSYISSSGSTIYYADSVKGRFTISRDNAKNSLYLQMNSLRAEDTAVYYCARDGDSSGWYARFDYWGQGTLVTVSS

SEQ ID NO: 2601 - protein, 109 aa, Homo sapiens
  MOD_RES (1)..(1): Any amino acid
  MOD_RES (3)..(3): Any amino acid
XAXDPVLTCTVSGGSIDTADYYWSWIRQHPGKGLDFIGYIYYTGSTFYAPSLRSRLTVSIDTSNNHFSLNLTSVTAADTAVYYCARGLRDPLSWYLDVWGKGTTVTVSS

SEQ ID NO: 2602 - protein, 107 aa, Homo sapiens
LRLSCAASGFTFSDYYMSWIRQAPGKGLEWVSYISSSSSYTNYADSVKGRFTISRDNAKNSLYLQMNSLRAEDTAVYYCARDPDQLFVQDPYYFDYWGQGTLVTVSS

SEQ ID NO: 2603 - protein, 110 aa, Homo sapiens
RLSCAASGFTFSSYSMNWVRQAPGKGLEWVSSISSSSSYIYYADSVKGRFTISRDNAKNSLYLQMNSLRAEDTAVYYCARGSLDDFWSGWIEDYYYMDVWGKGTTVTVSS

SEQ ID NO: 2604 - protein, 110 aa, Homo sapiens; identical to SEQ ID NO: 2603

SEQ ID NO: 2605 - protein, 107 aa, Homo sapiens; identical to SEQ ID NO: 2602

SEQ ID NO: 2606 - protein, 123 aa, Homo sapiens
VQLVESGGGVVQPGGSLRLSCAASGFTFDDYAMHWVRQAPGKGLEWVSLISGDGGSTYYADSVKGRFTISRDNSKNSLYLQMNSLRTEDTALYYCAKDPTPYSGRYFTWFDPWGQGTLVTVSS

SEQ ID NO: 2607 - protein, 123 aa, Homo sapiens
VQLVESGGGLVKPGGSLRLSCAVSGFTFSDYYMSWIRQAPGRGLEWVSFISSIGRTVYYADSVKGRFTISRDDAKNSLYLEMHSLRAEDTAVYFCARDPGGFGVVAPYYFDYWGQGTLVTVSS

SEQ ID NO: 2608 - protein, 122 aa, Homo sapiens
QLQESGPGLVKPSETLSLTCTVSGGSISSSSYYWGWIRQPPGKGLEWIGSIYYSGNTYYNPSLKSRVTISVDTSKNQFSLKLSSVTAADTAVYYCARHPVNYGDYVEWFDPWGQGTLVTVSS

SEQ ID NO: 2609 - protein, 103 aa, Homo sapiens; identical to SEQ ID NO: 2571

SEQ ID NO: 2610 - protein, 111 aa, Homo sapiens
RLSCAASGFTFSSYEMNWVRQAPGKGLEWVSYISGSGGTIYYADSVRGRFTISRDNAKNSLYLQMNSLRAEDTAVYYCARVGTERITIFGVVISAAAMDVWGQGTTVTVSS

SEQ ID NO: 2611 - protein, 108 aa, Homo sapiens
RLSCAASGFTFSSYSMNWVRQAPGKGLEWVSSISSSGSYIYYADSLKGRFTISRDNAKNSLYLQMNSLRAEDTSVYYCARSVYDTKPMTYYYYYMDVWGKGTTVTVSS

SEQ ID NO: 2612 - protein, 100 aa, Homo sapiens
ASGYTFTSYYMHWVRQAPGQGLEWMGIINPSGGSTSYAQKFQGRVTMTRDTSTSTVYMELSSLRSEDTAVYYCARGVLLWFGENENNDYWGQGTLVTVSS

SEQ ID NO: 2613 - protein, 68 aa, Homo sapiens
IYYADSVKGRFTISRDNAKNSLYLQMNSLRDEDTAVYYCARRGGACGSGGSCLPFDYWGQGTLVTVSS

SEQ ID NO: 2614 - protein, 110 aa, Homo sapiens
RSETLSLTCTVSGGSISSSSYYWGWIRQPPGKGLEWIGSIYYSGNTYYNPSLKSRVTISVDTSKNQFSLKLSSVTAADTAVYYCARHGVEYSTSSCFDYWGQGTLVTVSS

SEQ ID NO: 2615 - protein, 121 aa, Homo sapiens
QVQLQESGPGLVKPSQTLSLTCTVSGGSISSGDYYWSWIRQPPGKGLEWFGFIYYSGSTYYNPSLKSRVTISVDTSKNQFSLKLSSVTAADTAVYYCARGRSGSSWDFGYWGQGTLVTVSS

SEQ ID NO: 2616 - protein, 104 aa, Homo sapiens
LTCTVSGDSISNYYWTWIRQPPGKGLEWIGYFYDSGSLNYNPSLKSRVTISVDTSKSNFSLKLRSVTAADTAVYYCARGKRGGNPDFSQRFDPWGQGTLVTVSS

SEQ ID NO: 2617 - protein, 107 aa, Homo sapiens; identical to SEQ ID NO: 2602

SEQ ID NO: 2618 - protein, 103 aa, Homo sapiens
  MOD_RES (1)..(3): Any amino acid
  MOD_RES (22)..(22): Any amino acid
  MOD_RES (48)..(48): Any amino acid
  MOD_RES (52)..(52): Any amino acid
  MOD_RES (54)..(54): Any amino acid
  MOD_RES (59)..(59): Any amino acid
  MOD_RES (65)..(65): Any amino acid
  MOD_RES (69)..(69): Any amino acid
  MOD_RES (71)..(71): Any amino acid
  MOD_RES (73)..(73): Any amino acid
  MOD_RES (80)..(80): Any amino acid
XXXSLRISCKTSGYRFTTYWIXWVRQMPGKGLEWMGRIDPTDSYTNYXPSFXGXVTFSXDKSISXAYLXWXTXRASDTAXYYCARQRSEHDYWGQGTLVTVSS

SEQ ID NO: 2619 - protein, 104 aa, Homo sapiens
TLSLTCTVSGGSISSYFWSWIRQSPETGLEWIGYILYTGSTNYNPSLKGRVTISVDTSKNQFFLELNSVTAADTAVYYCARPSREGYLDYFDVWGQGTMVTVSS

SEQ ID NO: 2620 - protein, 109 aa, Homo sapiens
VSCKASGYTFTGYYMHWVRQAPGQGLEWMGWINPNSGGTNYAQKFQGRVTMTRDTSISTAYMELSRLRSDDTAVYYCATSTLNIVATIGPHYYYYGMDVWGQGTTVTVS

SEQ ID NO: 2621 - protein, 107 aa, Homo sapiens; identical to SEQ ID NO: 2602

SEQ ID NO: 2622 - protein, 108 aa, Homo sapiens
PSETLSLTCTVSGGSISSSSYYWGWIRQPPGKGLEWIGNIYYSGSTYYNPSLKSRVTISVDTSKNQFSLKLSSVTAADTAVYYCARHLRGDFVGQFDYWGQGTLVTVS

SEQ ID NO: 2623 - protein, 110 aa, Homo sapiens; identical to SEQ ID NO: 2603

SEQ ID NO: 2624 - protein, 112 aa, Homo sapiens
SETLSLTCTVSGGSISSSSYYWGWIRQPPGKGLEWIGSIYYSGSTYYNPSLKSRVTISVDTSKNQFSLKLSSVTAADTAVYYCAGKTYDFWSGYPIKVVDYWGQGTLVTVSS

SEQ ID NO: 2625 - protein, 109 aa, Homo sapiens
  MOD_RES (14)..(15): Any amino acid
  MOD_RES (20)..(20): Any amino acid
LSLTCTVSGGSISXXGYYWXWIRQHPGKGLEWIGYIYYSGSTYYNPSLKSRVTISVDTSKNQFSLKLSSVTAADTAVYYCARAPDDFWSGYWGYYFDYWGQGTLVTVSS

SEQ ID NO: 2626 - protein, 107 aa, Homo sapiens
  MOD_RES (8)..(8): Any amino acid
  MOD_RES (40)..(40): Any amino acid
TCTVSGGXISSSSYYWGWIRQPPGKGLEWIGSIYYSGSTXYNPSLKSRVTISVDTSKNQFSLKLSSVTAADTAVYYCARLKGGWELLIYYYYYMDVWGKGTTVTVSS

SEQ ID NO: 2627 - protein, 109 aa, Homo sapiens
SETLSLTCTVSGGSISSSSYYWGWIRQPPGKGLEWIGSIYYSGNTYYNPSLKSRVTISVDTSKNQFSLKLSSVTAADTAVYYCARRGEGYSSSSSFDYWGQGTLVTVSS

SEQ ID NO: 2628 - protein, 103 aa, Homo sapiens
LRLSCAASGFTFSSYGMHWVRQAPGKGLEWVAVISYDGSNKYYADSVKGRFTISRDNSKNTVYLQMNSLRAEDTAVYYCAKDSEGYEYYFDYWGQGTLVTVSS

SEQ ID NO: 2629 - protein, 103 aa, Homo sapiens
LRLSCAASGFTFSGYDMHWVRQAPGKGLEWVALICFDGKNKYYADFVEGRFIISRDNSQNTLFLQMHSLRAEDTAVYYCGRVAGGTYSWFDFWGQGTLVTVSS

SEQ ID NO: 2630 - protein, 107 aa, Homo sapiens
LRLSCAASGFTFSSYSMNWVRQAPGKGLEWVSSISSSSSYIYYADSVKGRFTISRDNAKNSLYLQMNSLRAEDTAVYYCASLRVDTAMVTWGDQDYWGQGTLVTVSS

SEQ ID NO: 2631 - protein, 107 aa, Homo sapiens; identical to SEQ ID NO: 2602

SEQ ID NO: 2632 - protein, 118 aa, Homo sapiens
GASVNVSCKASGYTFTGYYMHWVRQAPGQGLEWMGWINPNSGGTNYAQKFQGRVTMTRDTSITTAYMDLSRLRSDDTAVYYCARIGVKGGSYDFWSGYYPNPGGYFDYWGQGTLVTVS

SEQ ID NO: 2633 - protein, 97 aa, Homo sapiens
VQLVQSGAEVKKPGSSVKVSCKTSGGTFSSYAISWVRQAPGQGLEWMGGIIGMFGTTNYAQKFQGRVTITADEISSTAYMELSSLRSEDTAVYYCAR

SEQ ID NO: 2634 - protein, 62 aa, Homo sapiens
ISWVRQAPGQGLQWMGGIIPSFATTKYAQKFRERVIITADESTTTAYMELGGLTSDDTAVYH

SEQ ID NO: 2635 - protein, 77 aa, Homo sapiens
LTCAVSGASIRNYYWSWIRQPPGKGLEWIGSIYYSGNIYYNPSLKSRVTLSIDTSKSQVSLRLSSVTAADTAMYYCA

SEQ ID NO: 2636 - protein, 67 aa, Homo sapiens
  MOD_RES (37)..(37): Any amino acid
YAMHWVRQVPGKGLEWVSGISWNSNFLDYADSVKGRXTISRDDAKNSLYLEMNSLRLEDTAFYYCAK

SEQ ID NO: 2637 - protein, 87 aa, Homo sapiens
  MOD_RES (1)..(3): Any amino acid
XXXGRSLRLSCEASGFIFSSFAMHWVRQAPGKGLEWVALISFDGGRTFSADSVKGRFTISRDNSKNTVFLHMNSLRPADTAVYFCAR

SEQ ID NO: 2638 - protein, 81 aa, Homo sapiens
LRLSCAASGFTLSSYGMHWVRQAPGKGLEWVALIWFDGSNKYYTDSVKGRFIISRDHSKNTLYLQMNSLRAEDTAVYHCAR

SEQ ID NO: 2639 - protein, 57 aa, Homo sapiens
  MOD_RES (2)..(2): Any amino acid
  MOD_RES (8)..(9): Any amino acid
  MOD_RES (22)..(22): Any amino acid
PXEGLEWXXEINQSGSTTYNPXLKSRVTLSVDTSKNQFSLRLTSVTAADTAVYYCVR

SEQ ID NO: 2640 - protein, 80 aa, Homo sapiens
SCAATGFTFSGSSIHWVRQAPGKGLEWVGRIRSKYNDLATAYTESVKGRFTISRDDSKNTAYLQMNSLRIEDSAVYYCTR

SEQ ID NO: 2641 - protein, 80 aa, Homo sapiens
RLSCVASGFAFNTYAMHWVRQAPGKGLEWVALMSFYGTTTYEADSVKGRFTISRDNSKNTLYLQMNSLRPEDTAVYFCAR

SEQ ID NO: 2642 - protein, 81 aa, Homo sapiens
LRLSCAASRFNFNNYAMHWVRQAPGKGLEWVAVVSADGTYTNYGDSMKGRVTVSRDNLKKTMYLQINSLRPEDTAMYYCGK

SEQ ID NO: 2643 - protein, 77 aa, Homo sapiens
LTCTVSGASIRSYYWSWIRQPPGKGLEWIGSIYYSGNINYNPSLKSRVTLSVDTSKSQFSLKLNSVTAADTAMYYCA

SEQ ID NO: 2644 - protein, 72 aa, Homo sapiens
GYSVTSYWIGWVRQMPGKGLEWMGVIHPGNSESRYSPSFQGQVTMSADKSINTAYLEWSSLKASDTAMYYCA

SEQ ID NO: 2645 - protein, 98 aa, Homo sapiens
EVQLVESGGGWVQPGGSLRLSCEASGFTFSLYWMGWVRQAPGKGLEWVATMNQDGSDNYYVDSVKGRFTISRDNAKNSLYLQMNSLRAEDTAVYYCAR

SEQ ID NO: 2646 - protein, 98 aa, Homo sapiens
QVQLVESGGGVVRPGGSLRLSCEASGFTLNNYGMHWVRQAPGRGLEWVAVMWAGGRNRFYADSVKGRFTISRDDSKNTLSLQMHSLRAEDTGVYYCLR

SEQ ID NO: 2647 - protein, 97 aa, Homo sapiens
VQLVQSGAEVKKPGASVKVSCKASGYTFRNFDINWVRQAPGQGLEWMGWMNPNNGDTGYAEKFRGRVSMTRDTSRNTAFMELRGLTSEDTAIYYCAR

SEQ ID NO: 2648 - protein, 79 aa, Homo sapiens
ISCKVSGYSFTSYWIGWVRQMPGKGLEWMGIIYPDDSDTKYSPTFQGQVTISADKSISTAYLQWSSLKASDTAMYYCAR

SEQ ID NO: 2649 - protein, 83 aa, Homo sapiens
TLSLTCAVSGGSISRGGFTWSWIRQPPGKALEWIGYIYQSGSTYYSPSLKSRVNISLDKSNNRFFLNVMSVTAADTAVYYCAR

SEQ ID NO: 2650 - protein, 97 aa, Homo sapiens
EVQLVESGGGLVQPGGSLRLACTASGSIFTIPWMGWVRQAPGKGLEWVANINQDGSDTTFLGPVKGRFTISRDNTKNSVFLQMNVLRDEDSAIYYCA

SEQ ID NO: 2651 - protein, 54 aa, Homo sapiens
KGLEWIGEINHSGSTNYNPSLKSRVTISVDTSKNQFSLKLSSVTAADTAVYYCA

SEQ ID NO: 2652 - protein, 98 aa, Homo sapiens
EVQLVESGGGVVQPGGSLRLSCAASGFTFNNYWMSWVRQTPGKGLEWVANIKQDGSEKYYVDSVKGRFTMSRDNANNSLYLQMSNLRAEDTAIYYCAR

SEQ ID NO: 2653 - protein, 97 aa, Homo sapiens
EVQLVESGGGLVQPGGSLRLACTASGSIFNIPWMSWVRQGPGKGLEWVANINQDGSDTTFLGSVEGRFTISRDNARNSVFLQMSVLRVEDTATYYCA

SEQ ID NO: 2654 - protein, 81 aa, Homo sapiens
  MOD_RES (3)..(3): Any amino acid
GGXLRLSCSASGFIFSHYAMNWARQAPGKGLEWVSGVSTSGDRTVYADSVKGRFTISRDNSKNTLYLQMNSLRVEDTALYY

SEQ ID NO: 2655 - protein, 81 aa, Homo sapiens
LRLSCAASGFTFRDFYMSWIRQVPGKGLEWVSYISGSGNAKYHADSVRGRFTISRDNAKDSLFLQMNNLRVDDTAVYYCAR

SEQ ID NO: 2656 - protein, 64 aa, Homo sapiens
WSWVRQPPGKGLEWLGYLYYSGTTSYNPSLKSRVTMSADTSKRQLSLRLTSVTSADTAVYYCAR

SEQ ID NO: 2657 - protein, 80 aa, Homo sapiens
  MOD_RES (17)..(17): Any amino acid
  MOD_RES (21)..(21): Any amino acid
RLSCATSGFTFSGYWMXWVRXAPGKGLEWVATIKRDGSAKYYVDSAKGRFTISRDNTKNSVDLHMRSLTVEDTALYYCAR

SEQ ID NO: 2658 - protein, 79 aa, Homo sapiens
KVSCTASGYTFNMHYIHWVRQAPGQGLEWMGFIDPSGDSRSYSQKFQGRVTLTSDTSTSTVYMELRTLRSDDTAVFYCA

SEQ ID NO: 2659 - protein, 78 aa, Homo sapiens
VSCKASGYTFTTYSMNWVRQAPGQGLEWMGWINTYTGNPTYAQAFTGRFVFSLDTSVSTAFLQITSLKADDTAIYYCA

SEQ ID NO: 2660 - protein, 79 aa, Homo sapiens
LTLSCVGSGFIFSNYAIHWVRQAPGKGLDWVSGVTDDESYKSYANSVKGRYTISRDNSRNTVYLHMDSLRPEDTAIYYC

SEQ ID NO: 2661 - protein, 81 aa, Homo sapiens
LRLSCEASGFTFSNSAMSWVRQAPGKGLEWVSSISGGGHSTYYADSVKGRFSISRDNSKNTLYLQLNSLRAEDTAIFYCVK

SEQ ID NO: 2662 - protein, 58 aa, Homo sapiens
  MOD_RES (4)..(5): Any amino acid
RQPXXKGLEWLAYIHYSGSTSYSPSLKSRITMSVDTSKSQFSLKLNSVTAADTAVYYC

SEQ ID NO: 2663 - protein, 78 aa, Homo sapiens
RLSCAASGFSFSTYWMNWVRQIPGKGLEWVANIKQDGSEKYYVDSVKGRFTISRDNAKNSLYLQMNSLRVEDTAVFYC

SEQ ID NO: 2664 - protein, 99 aa, Homo sapiens
QVQLQESGPGLVKPSETLSLICSVSGGSVTSGIYHWTWIRQPPGKGLEWIGYIHYSGSTFYNPSLKSRVTISLNAAKNHFSLRLSSVTAADTAVYYCAR

SEQ ID NO: 2665 - protein, 74 aa, Homo sapiens
VSGESLSGYFWNWIRQSPGKGLEWIGEISQSRVTTYNPSLGGRVYFSVDTSKNQFSLNLNSVTAADTAVYYCAR

SEQ ID NO: 2666 - protein, 82 aa, Homo sapiens
SVRVSCKDSEDTFSTYVMHWVRQAPGQGLEWMGELVPVYGTPNYAQAFQDRITISADESTNTAYLELSSLTSEDTAVYYCAR

SEQ ID NO: 2667 - protein, 98 aa, Homo sapiens
EVQLVESGGGLVRPGGSLRLSCAPSGFTFSHYWVAWLRQAPEKGLEWLAQINQDGREKHYVDSVRGRFTISRDNAKNSLYLQMNSLRVEDTALYYCSR

SEQ ID NO: 2668 - protein, 82 aa, Homo sapiens
SVRVSCKTSEDTFSTYVMHWVRQAPGQGLEWMGELVPIYGTPNYAQAFHDRITITADESTSTAYLEMTSLTSEDTAVYYCAR

SEQ ID NO: 2669 - protein, 81 aa, Homo sapiens
LRLSCAASGFTFSSYGMHWVRQAPGKGLEWVSLIWFDGGTKYYADSVKGRFTISRDNSKNTLYLQMNSLRAEDTAVYYCAK

SEQ ID NO: 2670 - protein, 80 aa, Homo sapiens
LTCTVSGASITNADSWWNWIRQSPGKGLEWIGYIYYSGNTYYNPSLRSRASISVDTSKNEFFLSLTSVTAADTAVYYCAR

SEQ ID NO: 2671 - protein, 74 aa, Homo sapiens
SGFSFSNYGMHWVRQAPGKGLEWVAVISHDGSNEDYADSVKGRFTISRDNSKNNLYLQMNRLRAEDTAVYYCAK

SEQ ID NO: 2672 - protein, 75 aa, Homo sapiens
KASGYTFTGYYVHWVRQAPGQGLEWMGWINPNSGGTNYAQRFQGRVTMTRDTSFSTVYMEVNRLRSDDTAVYYCA

SEQ ID NO: 2673 - protein, 81 aa, Homo sapiens
LRLSCSASGFTFDDSAIHWVRQPPGKGLEWVSSISWNSDTIYYADSVKGRFTISRDNTKNSLYLQMTSLTSEDTALYFCAK

SEQ ID NO: 2674 - protein, 81 aa, Homo sapiens
LRLSCAASGFTFEHYAMHWVRQAPGKGLEWVSLITGDGSDTFYSDSVKGRFTISRDNNKNSLYLQMYSLSSEDTALYFCAK

SEQ ID NO: 2675 - protein, 54 aa, Homo sapiens
  MOD_RES (5)..(6): Any amino acid
  MOD_RES (17)..(17): Any amino acid
  MOD_RES (19)..(19): Any amino acid
  MOD_RES (28)..(28): Any amino acid
  MOD_RES (30)..(30): Any amino acid
  MOD_RES (33)..(35): Any amino acid
  MOD_RES (37)..(37): Any amino acid
  MOD_RES (43)..(43): Any amino acid
  MOD_RES (47)..(47): Any amino acid
  MOD_RES (49)..(50): Any amino acid
KGLEXXSYISSRGDTIXYXDSVKGRFTXSXDNXXXSXYLQMNXLQAXDXXVYYC

SEQ ID NO: 2676 - protein, 80 aa, Homo sapiens
RLSCAASGLIFSNYYMSWIRQAPGKGLEGVSYISGSATIIYYADSVKGRFTISRDNPRNSLYLQMNSLRAEDTAVYYCAR

SEQ ID NO: 2677 - protein, 82 aa, Homo sapiens
LRLSCAASGFTFDDYAMHWVRQAPGKGLEWVSGISWNSGSRVYADSVKGRFTISRDNAKTSLYLQMNSLRPEDTALYYCVKD

SEQ ID NO: 2678 - protein, 79 aa, Homo sapiens
  MOD_RES (4)..(4): Any amino acid
RLSXAASGFTFRVYGFHWVRQAPGKGLEWVAAISSDGSNKYYADSVKGRFVISRDNSENTLYLQMDSLRPEDTAVYYCA

SEQ ID NO: 2679 - protein, 72 aa, Homo sapiens
YTFTTYWLGWVRQMPGEGLEWMGIIYPGDSHTRYSPSFQGQVTLSADTSTNTAYLHWFSLKASDTAIYYCVR

SEQ ID NO: 2680 - protein, 51 aa, Homo sapiens
WVAVISSDGSNKYYADSVKGRFTISRDNSKNTLYLQMNSLRSEDTAVYSCA

SEQ ID NO: 2681 - protein, 64 aa, Homo sapiens
YCGWIRQPPGKGLEWVGSIDYTGNTYYNPSLKSRVTISEDTSKNQFSLKMTSVTAADTAVYYCA

SEQ ID NO: 2682 - protein, 44 aa, Homo sapiens
GSTIYYADSVKGRFTISRDNAKKSVYLEMNSLRAEDTAVYYCAR

SEQ ID NO: 2683 - protein, 82 aa, Homo sapiens
LRLSCAASGFTFNDYAMHWVRQAPRKGLEWVSTVNWNSGDIGYADSVKGRFTISRDNAKKSLFLQMNSLRPEDTAFYYCVKH

SEQ ID NO: 2684 - protein, 81 aa, Homo sapiens
  MOD_RES (5)..(5): Any amino acid
RLSCXASGFIFDDYAMYWVRQAPGKGLEWVAGINWKSNNLGYADSVKGRFTISRDSAKKSLYLQMNSLRSEDTATYYCAKD

SEQ ID NO: 2685 - protein, 84 aa, Homo sapiens
WGVLRLSCAASGFIFTSYWMHWVRQAPGKGLVWVSRIKSDGRDISYADSVKGRFTVSRDNAKNTVYLQMNSLRAEDTAVYYCAR

SEQ ID NO: 2686 - protein, 82 aa, Homo sapiens
LRLSCAASGFSFEEYGMHWVRQAPGKGPEWVSFINWNSGDIGYADSVEGRFTISRDNAKNSLFLQMNSLRTEDTALYYCVKH

SEQ ID NO: 2687 - protein, 65 aa, Homo sapiens
SFAISWVRQAPGQGLEWMGGITAMFGTAFYAQRFQDRLTITADKPTDKFMSTVSMELRSLTSEDT

SEQ ID NO: 2688 - protein, 81 aa, Homo sapiens
LRLSCAASGFSFSSYGMHWVRQAPGKGLEPVAIIAYDGSNKYYADSVRGRFTVSRDNSKNTLYLQMNSLRTEDTAVYYCAK

SEQ ID NO: 2689 - protein, 80 aa, Homo sapiens
  MOD_RES (4)..(4): Any amino acid
  MOD_RES (60)..(60): Any amino acid
LTCXVSGDSISSGGYYWNWIRQSPGKGLEWIGYIYFTGKTNYNPSLKSRVTISVDPSKTXFSLKLTSVTAADTAVYYCAR

SEQ ID NO: 2690 - protein, 81 aa, Homo sapiens
LRLSCSASGFTFDDAAMHWVRHRPGKGLEWVSSISWNSDTIHYADSVKGRFTISRDNAKNSVYLQMSRLTSEDTALYFCAK

SEQ ID NO: 2691 - protein, 81 aa, Homo sapiens
  MOD_RES (17)..(17): Any amino acid
LRLSCVASGFTFSKYGXDWVRQAPGKGLEWVSGISASGGRTYYADSVKGRFTISRDNSRDTFFLQMNSLRNDDTAIYYCTR

SEQ ID NO: 2692 - protein, 80 aa, Homo sapiens
LTCTVSGGSISGGNYYWTWIRQPAGKGLEWIGRIYPSGSTNYNPSLKSRVTISVDTSKNHFSLNLSSVTAADTAVYYCAR

SEQ ID NO: 2693 - protein, 80 aa, Homo sapiens
RLSCAASGFTFSSDGMHWVRQAPGKGLEWVAFIRYDGSKKYYADSVKGRFTISRDNSKSSLYLQMNSLRTDDTAVYYCAK

SEQ ID NO: 2694 - protein, 81 aa, Homo sapiens
LRLSCAASGFTFSDYYMSWIRQAPGKGPEWISSISSSSTTKSYADSVKGRFTISRDNAQNSLFLHMNSLRADDAAVYFCAR

SEQ ID NO: 2695 - protein, 88 aa, Homo sapiens
  MOD_RES (1)..(1): Any amino acid
XLELSEVSCKTSGYTFTRYFIHWVRQAPGQGLEWMGMINPRNPRGGSTSYAQNLQGRVTLTSDTSTSTVYLELSSLKSEDTAVYHCAR

SEQ ID NO: 2696 - protein, 87 aa, Homo sapiens
  MOD_RES (4)..(4): Any amino acid
  MOD_RES (21)..(21): Any amino acid
AELXTLSLTCNVSGGSITTGXYYWAWIRQPAGKGLEWVGRIFITGSTDYNPSLKSRVTISLDTSKNQFSLKLTSVTAADTAVYFCAR

SEQ ID NO: 2697 - protein, 84 aa, Homo sapiens
AGGLRLSCVASGFTFSSYDMNWVRQAPGKGLEWISYISGSGNIIYYADSVKGRFTISRDNAKNSLYLQMNSVRDDDTALYYCAR

SEQ ID NO: 2698 - protein, 80 aa, Homo sapiens
LRLSCAASGFTFSSYGMHWVRQAPGKGLEWVAFVRYDGSNICYAASVKGRFTISRDNSKNTVYLQMNSLRADDTAVYYCA

SEQ ID NO: 2699 - protein, 79 aa, Homo sapiens
RLSCAASGFTFSTYAMSWVRQAPGKGLEWVSTITGNGRTFYADSVKGHFTISRDNSKNMLYLQMNSLRAEDTAVYYCAK

SEQ ID NO: 2700 - protein, 79 aa, Homo sapiens
RLSCAASGFAFSNYVMAWVRQAPGKGLEWVSNIVGSGDSTYYADSVKGRFSISRDNSNNTLTLQMHSLRAEDTAIYYCT

SEQ ID NO: 2701 - protein, 81 aa, Homo sapiens
LRLSCAASGFTFSRYWMSWVRQTPGKGLEWVANIDEDGRDKYYVDSVKGRFSISRDNAKNSLHLQMSNLRAEDTAVYYCAR

SEQ ID NO: 2702 - protein, 83 aa, Homo sapiens
LRLSCTASGFTFGDYALSWVRQAPGKGLEWVGFIRSKAYGGTTEYAASVKGRFTISRDDSKSIAYLQMNSLKTEDTAVYYCTR

SEQ ID NO: 2703 - protein, 79 aa, Homo sapiens
LTCTVSSYSITSGYYWGWVRQPPGKGLEWIASIYHSGSTYYNMSLKSRVTISVDTSKNQFSLKLTSVTAADTAVYYCAR

SEQ ID NO: 2704 - protein, 79 aa, Homo sapiens
VSCKASGYTFTSYGISWVRQAPGQGLEWMGWISTKNVNTNYAQKLQGRVTMTADTSTSTAYMDLRTLRSDDTAVYFCAR

SEQ ID NO: 2705 - protein, 79 aa, Homo sapiens
VSCEASGYRFTDYYIVWMRQAPGQGLERMGRINPQSGGTDVPQKFQGTVTLTRDTSISTAYMELSSLRSDDTALYFCAR

SEQ ID NO: 2706 - protein, 78 aa, Homo sapiens
LTCTVSGASISSYYWNWIRQPPGKGLEWIGYIYHTGSTNSNPSLKSRVTISVDTSKNQFSLKLSSVTAADTAVYYCAR

SEQ ID NO: 2707 - protein, 83 aa, Homo sapiens
SGTLSLTCAVSGASVTSNNWWIWVRQPPGKGLEWIGEIWHSGRTNYNSSLKSRLSISVDIFKHQFSLNLNSLTAADTAVYYCA

SEQ ID NO: 2708 - protein, 80 aa, Homo sapiens
LTCIVSGDSIITSTYYWGWIRQSPGKGLEWIGSINSGGRTTYGPSLDGRVTMSVDTSNNQLSLKLRSVTAADTAVYYCAR

SEQ ID NO: 2709 - protein, 41 aa, Homo sapiens
IYYADSVKGRFTISRDNAKNSLYLQMNSLRAEDTAVYYCAR

SEQ ID NO: 2710 - protein, 79 aa, Homo sapiens
RLSYEVSGFTVSSNFMSWVRRAPGKGLEWVSVIYSGGGTYYGDSVKGRFTISRDTSRNSLSLQMNSLSVEDTGIYYCAR

SEQ ID NO: 2711 - protein, 81 aa, Homo sapiens
LRLSCAASGFIFSEYWMQWVRQTPGKGLEWVANIHPGGNERYHVDSVRGRFTISRDNAKNSLYLQMNSLRAEDTAIYYCTR

SEQ ID NO: 2712 - protein, 79 aa, Homo sapiens
LTCAVSGSSISRGYYWAWIRQPPGKGLEWIGSIYHSVNTYYNPSLKSRVTVSVDTSKNQLSLRLTSVTAADTAMYYCAR

SEQ ID NO: 2713 - protein, 81 aa, Homo sapiens
LRLSCVGSGFTFHYAWMSWVRHSPGKGLEWVGRVKSQSDGGAADYGAAVKGRFTISRDDSKNTVFLQMNSLRTEDTGVYYC

SEQ ID NO: 2714 - protein, 79 aa, Homo sapiens
VSCKGSGGSFNNFAINWVRQAPGQGLEWMGGISPIFGAVHHAQKFQGRVTITADIFTSTAYMELSSLGSEDTAIYYCAR

SEQ ID NO: 2715 - protein, 82 aa, Homo sapiens
SVRVSCKGSGGDFNNFAINWVRQAPGQGLEWMGGISPIFGGVKHAQKFQGRVTITADIFARTVYMDLSNLGSDDTAIYFCAR

SEQ ID NO: 2716 - protein, 80 aa, Homo sapiens
RLSCAASGFTFSTYAMSWVRQAPGKGLEWVSGISGSGDDTYYADSVKGRFTISRDNSKNTVYLEMSSLRAEDTAVYFCAK

SEQ ID NO: 2717 - protein, 86 aa, Homo sapiens
  MOD_RES (1)..(2): Any amino acid
XXGGSLRLSCAASGFNLHSYEMYWVRQAPGKGLEWVSFISSRSDAIYYAGSVQGRFTISRNNAANTLYLQMNSLRVEDTALYYCAR

SEQ ID NO: 2718 - protein, 70 aa, Homo sapiens
TFTDFYMTWIRQGPGEGLEWISYMNSGGSVIRYADSVKGRFTIYRDNAKKSVHLEMNSLRPDDTAVYYCA

SEQ ID NO: 2719 - protein, 77 aa, Homo sapiens
  MOD_RES (3)..(3): Any amino acid
  MOD_RES (13)..(13): Any amino acid
CAXSGFTFTNAWXNWIRQAPGKGLEWVARIKRKIEGEATDYAAPVKGRFTISRDDSRYTVHLQMDSLKSEDTAVYYC

SEQ ID NO: 2720 - protein, 81 aa, Homo sapiens
SVRVSCKASGAIFNNYAIGWVRQAPGQGLEWMGQSIPLLGTTKYAHKFQGRVTITAEDSGSTTYLDLSRLNFDDTAVYYCV

SEQ ID NO: 2721 - protein, 81 aa, Homo sapiens
LRLSCAVSGFPFNNFAMHWVRQAPGKGLQWVSSITSSSNDIYYADSVKGRFTISRDNAKNSLFLQMNSLRTDDTAVYYCAR

SEQ ID NO: 2722 - protein, 79 aa, Homo sapiens
  MOD_RES (1)..(1): Any amino acid
XVSCKASGYRLTRYYMHWVRQAPGQGLEWMGVIDPSGGGTTYAQKFQGRVTMTRDTSTSTVNMQLTSLRSEDTAVYYCA

SEQ ID NO: 2723 - protein, 80 aa, Homo sapiens
LRLSCAASGFTFSTYWMKWVRQAPGKGLECVANIEPDGSQRWHVDSVKGRFTISRDNAKNSLYLQMNSLRGEDTAMYYCA

SEQ ID NO: 2724 - protein, 80 aa, Homo sapiens
LRLSCTASGFSFSDSEMNWVRQAPGKGLEWVAYIFASGSTLFYADSVKGRFTISRDNAKNSLYLQMNSLRGEDTAVYYCA

SEQ ID NO: 2725 - protein, 78 aa, Homo sapiens
LTCTVFGGSISTHYWSWIRQTPGKGLECIGYISDSGRTNYNPSLKSRVTISIDTSKNQFSLKLRSVTAADTAVYFCAR

SEQ ID NO: 2726 - protein, 79 aa, Homo sapiens
VSCRASDYTFTSYGINWVRQAPGQGLEWMGWISSYNGNKHYVQKFQGRVTMTTDTSTNTAYMELRSLRSDDTAVYYCAR

SEQ ID NO: 2727 - protein, 81 aa, Homo sapiens
VRVSCKASGGAFRNFAISWVRQAPGQGLEWMGGITAIFGTTNYAQKFQGRLTITADESTSSTYMELSSLRSEDTAVYYCAK

SEQ ID NO: 2728 - protein, 82 aa, Homo sapiens
  MOD_RES (2)..(4): Any amino acid
IXXXSCKGSGRNFNNFAINWVRQAPGQGLEWMGGISPIFGAVKHGQEFQGRVTFTADVFTSTVYMELSSLGSEDTAIYYCAR

SEQ ID NO: 2729 - protein, 67 aa, Homo sapiens
YWMSWVRQAPGRRPEWVAKIKHDGSEKYYVGSVQGRFIISKDNAKNFLYLQMDRLRADDTAVYYCAR

SEQ ID NO: 2730 - protein, 80 aa, Homo sapiens
RLSCAVSGLSFSDYFMGWIRQAPGKGPEWLSYISSSGYTIFYADSVKGRFTISRDNSKNSLYLQMNSLTAEDTAVYYCAR

SEQ ID NO: 2731 - protein, 48 aa, Homo sapiens
ISGSGTYIYYADSVRGRFTISRDNAKTSLYLQMNSLRAEDTAVYYCAR

SEQ ID NO: 2732 - protein, 79 aa, Homo sapiens
VSCKASGGTFNNFAINWVRQAPGQGLEWMGGISPIFGAGKHAQKLQGRVTITADVFTSTVYMELGSLRSEDTATYYCAR

SEQ ID NO: 2733 - protein, 82 aa, Homo sapiens
SVRVSCKGSGGDFNNFAINWVRQAPGQGLEWMGGISPIFGAVKHAQKFQGRLTITADVFVKTAYMELSSLGFEDTAIYYCAK

SEQ ID NO: 2734 - protein, 81 aa, Homo sapiens
LRLSCAASGFAFSSYGMTWVRQAPGKGLEWVSAISGSGGSTWYADSVKGRFTISRDNSQSTLFLQMHGLRADDTAIYYCAK

SEQ ID NO: 2735 - protein, 81 aa, Homo sapiens
LRLSCAASGFTFTTSAMSWVRRAPGKGLEWVSTISGIGDTTYYADSVKGRFTISRDNSKKSLYVQLDSLRAEDTAVYYCAK

SEQ ID NO: 2736 - protein, 81 aa, Homo sapiens
LRLSCAASGFSFSSYWMTWVRQAPGKGLEWVANINQDGSEKDYVDSVKGRFTISRDNAQNSLFLQMDSLRVEDTALYYCAR

SEQ ID NO: 2737 - protein, 99 aa, Homo sapiens
EVQLVESGGGLVKPGGSLRVSCAASGFTFSAAWMNWVRQTPGKGLEWVGRIWSKSDGLTTQYAAPVQGRFTISRDDSKNTLYLQMNSLKTEDTAVYYCT

SEQ ID NO: 2738 - protein, 80 aa, Homo sapiens
LRLSCAASGFIFSNYWMTWVRQAPGKGLEGVANIKQDGSETYYVDSVKGRFTISRDNAQNSLYLQMNSLRAEDTAVYFCA

SEQ ID NO: 2739 - protein, 73 aa, Homo sapiens
SGGSMSPFYWNWIRQSPGKGLEWIGYVYYAGGTRYNPSLKSRVTITEDTSKNQFSLKLRSVTAADTAVYYCAR

SEQ ID NO: 2740 - protein, 84 aa, Homo sapiens
  MOD_RES (3)..(3): Any amino acid
SMXLGDVSCKASGGTFTNYAFSWVRQAPGQGLEWMGGIIPIFGTTNYAQRFQGRVTITADESTSTAYMELSSLRSEDTAVYYCA

SEQ ID NO: 2741 - protein, 86 aa, Homo sapiens
RGGESLKISCQGLGYNFAGYWFGWVRQRPGYGLEWMGTIYPGDSSTRYNPSFQGQISISADDSTTTAYLQWPSLKASDSGTYYCAG

SEQ ID NO: 2742 - protein, 78 aa, Homo sapiens
VSCKASGYTFTGYFIHWVRQAPGQGLEWMGWINPNSGGANSAQKFQGRVTMTRDTSITTAYMDLTRLTSDDTAVYYCA

SEQ ID NO: 2743 - protein, 56 aa, Homo sapiens
  MOD_RES (3)..(3): Any amino acid
  MOD_RES (8)..(8): Any amino acid
  MOD_RES (10)..(10): Any amino acid
  MOD_RES (13)..(14): Any amino acid
  MOD_RES (21)..(21): Any amino acid
  MOD_RES (27)..(27): Any amino acid
  MOD_RES (34)..(37): Any amino acid
  MOD_RES (40)..(40): Any amino acid
GLXWLGRXYXLAXXYTDSAVXVKGRIXVNADPSXXXXSLXLNSVTPEDTAVYYCVR

SEQ ID NO: 2744 - protein, 85 aa, Homo sapiens
SETLSLTCSVSGVAVNTDLYYWSWVRQAPGKGLEWIGYVYSHGRTNYNPSLKGRVTVSADPSTNTFSLNLMSMTAADKAVYYCAR

SEQ ID NO: 2745 - protein, 96 aa, Homo sapiens
LQESGPGLVKPSETLSLTCTVSGGSISGSGYFWGWIRQPPGEGLEWIGTINYGGTAYYNPSLKSRVAISVDTSKSQVSLRLSSVTAADTAVYYCAR

SEQ ID NO: 2746 - protein, 86 aa, Homo sapiens
  MOD_RES (64)..(64): Any amino acid
QPGGSLRLSCAASGFSFSSYWMTWVRQAPGKGLEWVANINQDGSEKDFVDSVKGRFTISRDNAXSSLFLQMNSLRAEDTAVYYCAR

SEQ ID NO: 2747 - protein, 73 aa, Homo sapiens
  MOD_RES (8)..(8): Any amino acid
  MOD_RES (31)..(31): Any amino acid
  MOD_RES (45)..(45): Any amino acid
VSSDTAAXNWIRQSPSRGLEWLGRTYYRSKXYNDYAVSVKSRIAXNPETSKNQFSLQLNSVTPEDTAVYYCAR

SEQ ID NO: 2748 - protein, 85 aa, Homo sapiens
SGGSLRLSCVGSGFTFSNYPIRWVRQAPGKGLEWVSSISATGATIYYADSVKGRFTISRDNSKNTVYLQVNSLRAEDTAVYYCAR

SEQ ID NO: 2749 - protein, 98 aa, Homo sapiens
EVQLLESGGGLVQPGGSLRLSCAASGSTSTSFPMSWVRQSPGMGPEWVSSISRDGILTYYKDSVKGRFTLSRDNSKNTLYLEMNSLTTDDTAVYYCAK

SEQ ID NO: 2750 - protein, 95 aa, Homo sapiens
VQLVQSGAEVKKPGSSVRVSCKASGGTFDTYAFSWVRQAPGQGLEWMGGIVPILGTTDYAQRFQGRVSITADKATTTAYMDLSSLRSEDTAVYYC

SEQ ID NO: 2751 - protein, 84 aa, Homo sapiens
SETLSLTCTVSGGSFSSNAYYWDWIRQPPGKGPEWIGSFYYRGTPYNNPSLKSRVTISLDTSKNQFSLKLTSVTAADTAVYYCA

SEQ ID NO: 2752 - protein, 79 aa, Homo sapiens
VSCKASGVTFSSYAISWVRQAPGQGLEWMGGVLPMFNVPKYAQKFQGRVTITADKSTNTAYLELSRLRSEDTAVYYCSR

SEQ ID NO: 2753 - protein, 40 aa, Homo sapiens
TYYADSVKGRFTISRDNSKNTVYLQIISLRVEDTAVYYCT

SEQ ID NO: 2754 - protein, 81 aa, Homo sapiens
SVTVSCKASGGTFSSRATSWVRQAPGQGLEWMGGIIPILDKTNYAQKFQGRVTITADRSTSTAYMELSSLRSEDTGMYYCA

SEQ ID NO: 2755 - protein, 98 aa, Homo sapiens
QVQLVESGGGVVQPGRSLRLSCAASGFTFRSFAMNWVRQAPGKGLEWVAGISYDGGNEYYVDSVKGRFTISRDNAKNTLHLQMNSLRAEDTAVYYCVK

SEQ ID NO: 2756 - protein, 82 aa, Homo sapiens
LRLSCAPSGFTFTHAWMTWVRQAPGKGLEWVGRIKSDRDGGTADYAAPVKGRFTISKDDSKKTVYLQMDSLKTEDTAIYYCT

SEQ ID NO: 2757 - protein, 72 aa, Homo sapiens
SGFSFSDYYMSWVRQAPGKGLDWVSSISTSGSIINYADSVKGRFIISRDNSKSSLFLDMSDLRVEDSALYYC

SEQ ID NO: 2758 - protein, 86 aa, Homo sapiens
QPGGSLRLSCEASGFIFSSYWMTWVRQAPGKGLEWVANINQDGSEKDYVDSVKGRFTISRDNAKNSLYLQMNSLRAEDTAVYYCAR

SEQ ID NO: 2759 - protein, 96 aa, Homo sapiens
VQLVESGGGLVQPGRSLRLSCAASGFNFDDYAMHWVWQTPGKGLEWVSGLSGDSGTIGYADSVKGRFTISRDNAKDSLYLQMNSLRTEDTALYYCV

SEQ ID NO: 2760 - protein, 95 aa, Homo sapiens
VQLVQSGAELKKPGASVKLSCKASGYTFSGYYMSWVRQAPGQGLEWMGWILPASGDTKYSQRFQGRVTMTTDTSISTAYMDLKSLTGDDTAVYYC

SEQ ID NO: 2761 - protein, 66 aa, Homo sapiens
  MOD_RES (15)..(15): Any amino acid
  MOD_RES (21)..(21): Any amino acid
  MOD_RES (23)..(23): Any amino acid
YYWGWVRQPPGKGLXWVGSVXYXGIAHYNPSLTSRVTIDVDRPKNQFSLKLTSVTAADTAVYYCAR

SEQ ID NO: 2762 - protein, 99 aa, Homo sapiens
EVQLVESGGGLVEPGGSLRLSCTGSGFPFINAYFSWVRQAPGKGLEWVARIKRQSSGGTTDYAAPVKGRFTISRDDSKNTVYLQMSSLRTEDTAVYYCA

SEQ ID NO: 2763 - protein, 97 aa, Homo sapiens
QLQESGPGLVKPSETLSLTCTVSGASMNSEAFYWGWIRQSPGKGLESIGSMSYSGTPYYKPSLKSRVSISLDTSKSSFSLKLTSVTAADTAVYFCAR

SEQ ID NO: 2764 - protein, 97 aa, Homo sapiens
QLQESGPGLVKPSETLSLTCTVSGGSISSSSYYWGGIRQPPGKGLEWIGSIYYSGSTYDNPSLKSRVTISVDTSKNQFSLKLSSVTAADTAVYYCAR

SEQ ID NO: 2765 - protein, 84 aa, Homo sapiens
  MOD_RES (1)..(2): Any amino acid
XXGLKCLLQASGYTFTGYYMHWVRQAPGQGLEWMGWINPNSGGTNYAHKFQGRVTMTRDTSISTAYMELSRLRSDDTAMYYCAR

SEQ ID NO: 2766 - protein, 97 aa, Homo sapiens
QLQESGPGLVKPSETLSLTCTVSGGSISSSSYYWGWIRQPPGKGLEWIGSIYYSGSTYYNPSLKSRVTISVDTSKKQFSLKLSSVTAADTAVYYCAR

SEQ ID NO: 2767 - protein, 81 aa, Homo sapiens
LRLSCAASGFRFSTFAMSWVRQSPGKGLEWVSAISGPGRGTYYTDSVEGRFTISRDNSKNVVFLQMNSLRAEDTAVYFCAK

SEQ ID NO: 2768 - protein, 79 aa, Homo sapiens
LTCTVSGGSISSSSYYWGWIRQPPGKGLEWIGSIYYSGSTYYNPSLKSRVTISVDTSKNQFSLKLSSVTAADTAVYYCA

SEQ ID NO: 2769 - protein, 80 aa, Homo sapiens
LRLSCAASGFTFSSYGMHWVRQAPGKGLEWVAVISYDGSNKYYADSVKGRFTISRDNSKNTLYLQMNSLRAEDTAVYYCA

SEQ ID NO: 2770 - protein, 83 aa, Homo sapiens
SETLSLTCTVSGGSISYYYWTWIRQPPGKGLQWIGFIYDSGSTNYNPSLKSRVTMSVDTSKNQFSLKLSSVTAADTAMYYCAR

SEQ ID NO: 2771 - protein, 83 aa, Homo sapiens
LRLSCTTSGFTFGDYAMSWVRQAPGKGLEWVGFIRAKPYGGTTEYAASLKGRFTISRDDSKSVAYLQMNSLKTEDTAVYFCAR

SEQ ID NO: 2772 - protein, 83 aa, Homo sapiens
  MOD_RES (3)..(3): Any amino acid
  MOD_RES (5)..(5): Any amino acid
TLXLXCTVSGGSISSGGYYWSWIRQHPGKGLEWIGYIYYSGSTYYNPSLKSRVTISVDTSKNQFSLKLSSVTAADTAVYYCAR

SEQ ID NO: 2773 - protein, 80 aa, Homo sapiens
LRLSCAASGFTFDDYAMHWVRQVPGKGLEWVSLISGDGGSTYYADSVKGRFTISRDNSKNSLYLQMNSLRTEDTALYYCA

SEQ ID NO: 2774 - protein, 84 aa, Homo sapiens
GASVKVSCKASGYTFIGYYMHWVRQAPGQGLEWMGWINPNTGGTNYAQKFQGRVTMTRDTSISTAYMELSRLRSDDTAVYYCAR

SEQ ID NO: 2775 - protein, 77 aa, Homo sapiens
TVSGGSISSSSYYWGWIRQPPGKGLEWIGSIYYSGNTYYNPSLKSRVTISVDTSKNQFSLKLSSVTAADTAVYYCGR

SEQ ID NO: 2776 - protein, 80 aa, Homo sapiens
LTCTVSGGSISSSSYYWGWIRQPPGKGLEWIGSMYYSGNTYYNPSLKSRVTISVDTSKNQFSLKLSSVTAADTAVYYCAR

SEQ ID NO: 2777 - protein, 81 aa, Homo sapiens
LRLSCAASGFTFSTYGMHWVRQAPGKGLEWVAVIWYDGSNKYYADSVKGRFTISRDNSKNTLYLQMNSLRAEDTAVYYCAR

SEQ ID NO: 2778 - protein, 81 aa, Homo sapiens
LRLSCAASGFKFSDYGMHWVRQAPGQGLQWVAVTSFVGTMKYYADSLKGRFTISRDNSKNTLYLQMNNLRAEDSGVYFCAK

SEQ ID NO: 2779 - protein, 79 aa, Homo sapiens
VSCKASGYTFTSYGISWVRQAPGQGLEWMGWISAYNGNTNYAQKLQGRVTMTTDTSTSTAYMELRSLRSDDTAVYYCAR

SEQ ID NO: 2780 - protein, 82 aa, Homo sapiens
SMRLSCAASGFTFSDYYMSWIRQAPGKGLEWVSYISSSGSTIYYADSVKGRFTISRDNAKNSLYLQMNSLRAEDTAVYYCAR

SEQ ID NO: 2781 - protein, 88 aa, Homo sapiens
  MOD_RES (1)..(2): Any amino acid
  MOD_RES (5)..(5): Any amino acid
XXSFXTLSLTCTVSGGSISSGGYYWSWIRQHPGKGLEWIGYIYYSGSTYYNPSLKSRVTISVDTSKNQFSLKLSSVTAADTAVYYCAR

SEQ ID NO: 2782 - protein, 85 aa, Homo sapiens
  MOD_RES (1)..(2): Any amino acid
XXESLRISCKGSGYSFTSYWISWVRQMPGKGLEWMGRIDPSDSYTNYSPSFQGHVTISADKSISTAYLQWSSLKASDTAMYYCAR

SEQ ID NO: 2783 - protein, 80 aa, Homo sapiens; identical to SEQ ID NO: 2769

SEQ ID NO: 2784 - protein, 80 aa, Homo sapiens
RLSCAASGFTFDDYAMHWVRQAPGKGLEWVSLISGDGGSTYYADSVKGRFTISRDNSKNSLYLQMNSLRTEDTALYYCAK

SEQ ID NO: 2785 - protein, 81 aa, Homo sapiens
LRLSCAASGFTFSSYWMSWVRQAPGKGLEWVANIKQDGSEKYYVDSVKGRFTISRDNAKNSLYLQMNSLRAEDTAVYYCAR

SEQ ID NO: 2786 - protein, 96 aa, Homo sapiens
EVQLVESGGGLIQPGGSLRLSCAASGFSVRSNYLTWVRQAPGKGLEWVSVIYSGDSTDYADSVKGRFTFSRDNSKNTVYLQMNSLRAEDTAVYYCA

SEQ ID NO: 2787 - protein, 97 aa, Homo sapiens
VQLVQSGAEVKKPGASVKVSCKASGYTFTGYYMHWVRQAPGQGLEWMGWINPNSGGTNYAQKFQGRVTMTRDTAISTAYMELSRLRSDDTAVYYCAR

SEQ ID NO: 2788 - protein, 80 aa, Homo sapiens; identical to SEQ ID NO: 2784

SEQ ID NO: 2789 - protein, 81 aa, Homo sapiens
  MOD_RES (17)..(18): Any amino acid
SLTCTVSGGSISSGGYXXSWIRQHPGKGLEWIGYIYYSGSTYYNPSLKSRVTISVDTSKNQFSLKLSSVTAADTAVYYCAR

SEQ ID NO: 2790 - protein, 82 aa, Homo sapiens
SETLSLTCTVSGGSISNYYWTWIRQPPGKGLEWIGNEYYSGSTNYNPSFKSRVTISVDSSKNQFSLKLSSVTAADTAVYYCA

SEQ ID NO: 2791 - protein, 74 aa, Homo sapiens
ASGYTFTGYYMHWVRQAPGQGLEWMGWINPNSGGTNYAQKFQGRVTMTRDTSISTAYMELSRLRSDDTAVYYCA

SEQ ID NO: 2792 - protein, 80 aa, Homo sapiens
LTCTVSGGSISSSSYYWGWIRQPPGKGLEWIGNIYYSGNTYYNPSLKSRVTISVDTSKNQFSLKLSSVTAADTAVYYCAR

SEQ ID NO: 2793 - protein, 80 aa, Homo sapiens
LRLSCAASGFTFSSYDMHWVRQATGKGLEWVSAIGTAGDTYYPGSVKGRFTISRENAKNSLYLQMNSLRAGDTAVYYCAR

SEQ ID NO: 2794 - protein, 79 aa, Homo sapiens
RLSCAASGFTFDDYAMHWVRQAPGKGLEWVSGISWNSGSIGYADSVKGRFTIFRNNAKNSLYLQMNSLRAEDTALYYCS

SEQ ID NO: 2795 - protein, 80 aa, Homo sapiens
RLSCAASGFTFSSYGMHWVRQAPGKGLEWVAVISYDGSNKYYADSVKGRFTISRDNSKNTLYLQMNSLRVEDTAVYYCAR

SEQ ID NO: 2796 - protein, 100 aa, Homo sapiens
EVQLVESGGGLVKPGGSLRLSCAASGFIFNNAWMSWVRQPPGKGLQWVGHFKIKADGGTTDYAAPVKGRFTISRDESKNMLYLQMNSLKTEDTAIYYCTT

SEQ ID NO: 2797 - protein, 80 aa, Homo sapiens
LTCTVSGGSISSSNYYWGWIRQPPGKGLEWIGSIYYSGNTYYNPSLKSRVTISVDTSKNQFSLKLSSVTAADTAVYYCAR

SEQ ID NO: 2798 - protein, 98 aa, Homo sapiens
EVQLVESGGGLVQPGGSLRLSCAASGFTFSSYPMHWVRQAPGKGLEYVSAISSNGGSTFYANSVKGRFTISRDNSKNTLYLQMGSLSAEDMAVYYCAR

SEQ ID NO: 2799 - protein, 79 aa, Homo sapiens; identical to SEQ ID NO: 2768

SEQ ID NO: 2800 - protein, 80 aa, Homo sapiens
LTCTVSGGSISSSSYYWGWIRQPPGKGLEWIGSIYYSGRTYYNPSLKSRVTISVDTSKNQFSLRLSSVTAADTAVYYCAR

SEQ ID NO: 2801 - protein, 98 aa, Homo sapiens
EVQLVQSGVEVKKPGESLKISCKGSGYSFTSYWIGWVRQMPGKGLEWMGVIYPSDSDTRYSPSFQGQVTISADTSISTAYLQWSSLKASDTAMYYCAR

SEQ ID NO: 2802 - protein, 80 aa, Homo sapiens
  MOD_RES (14)..(14): Any amino acid
  MOD_RES (27)..(27): Any amino acid
LTCTVSGGSISSSXYYWGWIRQPPGKXLEWIGSIYYSGNTYYNPSLKSRVTISVDTSKNQFSLKLSSVTAADTAVYYCAR

SEQ ID NO: 2803 - protein, 79 aa, Homo sapiens
LTCTVSDGSISSSSYYWGWIRQPPGKGLEWIGSIYYSGSTYYNPSLKSRVTISVDTSKNQFSLKLSSVTAADTAVYYCA

SEQ ID NO: 2804 - protein, 80 aa, Homo sapiens
LTCTVSGGSISSGGYYWSWIRQHPGKGLEWIGYIHYSGSTYYNPSLKSRVTISVDTSKNQFSLKLSSVTAADTAVYYCAR

SEQ ID NO: 2805 - protein, 81 aa, Homo sapiens
  MOD_RES (36)..(36): Any amino acid
LRLSCAASGFTFSRYGMHWVRQAPGKGLEWVAVIWXDGSNKYYADSVKGRFTISRDNSKNTLYLQMNSLRAEDTAVYYCAR

SEQ ID NO: 2806 - protein, 81 aa, Homo sapiens
  MOD_RES (18)..(18): Any amino acid
LRLSCAASGFTFSDYYMXWIRQAPGKGLEWVSYISSSGSTIYYADSVKGRFTISRDNAKNSLYLQMNSLRAEDTAVYYCAR

SEQ ID NO: 2807 - protein, 86 aa, Homo sapiens
  MOD_RES (1)..(1): Any amino acid
  MOD_RES (3)..(3): Any amino acid
XAXDPVLTCTVSGGSIDTADYYWSWIRQHPGKGLDFIGYIYYTGSTFYAPSLRSRLTVSIDTSNNHFSLNLTSVTAADTAVYYCAR

SEQ ID NO: 2808 - protein, 81 aa, Homo sapiens
LRLSCAASGFTFSDYYMSWIRQAPGKGLEWVSYISSSSSYTNYADSVKGRFTISRDNAKNSLYLQMNSLRAEDTAVYYCAR

SEQ ID NO: 2809 - protein, 80 aa, Homo sapiens
RLSCAASGFTFSSYSMNWVRQAPGKGLEWVSSISSSSSYIYYADSVKGRFTISRDNAKNSLYLQMNSLRAEDTAVYYCAR

SEQ ID NO: 2810 - protein, 80 aa, Homo sapiens; identical to SEQ ID NO: 2809

SEQ ID NO: 2811 - protein, 81 aa, Homo sapiens; identical to SEQ ID NO: 2808

SEQ ID NO: 2812 - protein, 97 aa, Homo sapiens
VQLVESGGGVVQPGGSLRLSCAASGFTFDDYAMHWVRQAPGKGLEWVSLISGDGGSTYYADSVKGRFTISRDNSKNSLYLQMNSLRTEDTALYYCAK

SEQ ID NO: 2813 - protein, 97 aa, Homo sapiens
VQLVESGGGLVKPGGSLRLSCAVSGFTFSDYYMSWIRQAPGRGLEWVSFISSIGRTVYYADSVKGRFTISRDDAKNSLYLEMHSLRAEDTAVYFCAR

SEQ ID NO: 2814 - protein, 97 aa, Homo sapiens
QLQESGPGLVKPSETLSLTCTVSGGSISSSSYYWGWIRQPPGKGLEWIGSIYYSGNTYYNPSLKSRVTISVDTSKNQFSLKLSSVTAADTAVYYCAR

SEQ ID NO: 2815 - protein, 81 aa, Homo sapiens; identical to SEQ ID NO: 2777

SEQ ID NO: 2816 - protein, 80 aa, Homo sapiens
RLSCAASGFTFSSYEMNWVRQAPGKGLEWVSYISGSGGTIYYADSVRGRFTISRDNAKNSLYLQMNSLRAEDTAVYYCAR

SEQ ID NO: 2817 - protein, 80 aa, Homo sapiens
RLSCAASGFTFSSYSMNWVRQAPGKGLEWVSSISSSGSYIYYADSLKGRFTISRDNAKNSLYLQMNSLRAEDTSVYYCAR

SEQ ID NO: 2818 - protein, 75 aa, Homo sapiens
ASGYTFTSYYMHWVRQAPGQGLEWMGIINPSGGSTSYAQKFQGRVTMTRDTSTSTVYMELSSLRSEDTAVYYCAR

SEQ ID NO: 2819 - protein, 41 aa, Homo sapiens
IYYADSVKGRFTISRDNAKNSLYLQMNSLRDEDTAVYYCAR

SEQ ID NO: 2820 - protein, 86 aa, Homo sapiens
RSETLSLTCTVSGGSISSSSYYWGWIRQPPGKGLEWIGSIYYSGNTYYNPSLKSRVTISVDTSKNQFSLKLSSVTAADTAVYYCAR

SEQ ID NO: 2821 - protein, 99 aa, Homo sapiens
QVQLQESGPGLVKPSQTLSLTCTVSGGSISSGDYYWSWIRQPPGKGLEWFGFIYYSGSTYYNPSLKSRVTISVDTSKNQFSLKLSSVTAADTAVYYCAR

SEQ ID NO: 2822 - protein, 78 aa, Homo sapiens
LTCTVSGDSISNYYWTWIRQPPGKGLEWIGYFYDSGSLNYNPSLKSRVTISVDTSKSNFSLKLRSVTAADTAVYYCAR

SEQ ID NO: 2823 - protein, 81 aa, Homo sapiens; identical to SEQ ID NO: 2808

SEQ ID NO: 2824 - protein, 85 aa, Homo sapiens
  MOD_RES (1)..(3): Any amino acid
  MOD_RES (22)..(22): Any amino acid
  MOD_RES (48)..(48): Any amino acid
  MOD_RES (52)..(52): Any amino acid
  MOD_RES (54)..(54): Any amino acid
  MOD_RES (59)..(59): Any amino acid
  MOD_RES (65)..(65): Any amino acid
  MOD_RES (69)..(69): Any amino acid
  MOD_RES (71)..(71): Any amino acid
  MOD_RES (73)..(73): Any amino acid
  MOD_RES (80)..(80): Any amino acid
XXXSLRISCKTSGYRFTTYWIXWVRQMPGKGLEWMGRIDPTDSYTNYXPSFXGXVTFSXDKSISXAYLXWXTXRASDTAXYYCAR

SEQ ID NO: 2825 - protein, 81 aa, Homo sapiens
TLSLTCTVSGGSISSYFWSWIRQSPETGLEWIGYILYTGSTNYNPSLKGRVTISVDTSKNQFFLELNSVTAADTAVYYCAR

SEQ ID NO: 2826 - protein, 78 aa, Homo sapiens
VSCKASGYTFTGYYMHWVRQAPGQGLEWMGWINPNSGGTNYAQKFQGRVTMTRDTSISTAYMELSRLRSDDTAVYYCA

SEQ ID NO: 2827 - protein, 81 aa, Homo sapiens; identical to SEQ ID NO: 2808

SEQ ID NO: 2828 - protein, 86 aa, Homo sapiens
PSETLSLTCTVSGGSISSSSYYWGWIRQPPGKGLEWIGNIYYSGSTYYNPSLKSRVTISVDTSKNQFSLKLSSVTAADTAVYYCAR

SEQ ID NO: 2829 - protein, 80 aa, Homo sapiens; identical to SEQ ID NO: 2809

SEQ ID NO: 2830 - protein, 84 aa, Homo sapiens
SETLSLTCTVSGGSISSSSYYWGWIRQPPGKGLEWIGSIYYSGSTYYNPSLKSRVTISVDTSKNQFSLKLSSVTAADTAVYYCA

SEQ ID NO: 2831 - protein, 82 aa, Homo sapiens
  MOD_RES (14)..(15): Any amino acid
  MOD_RES (20)..(20): Any amino acid
LSLTCTVSGGSISXXGYYWXWIRQHPGKGLEWIGYIYYSGSTYYNPSLKSRVTISVDTSKNQFSLKLSSVTAADTAVYYCAR

SEQ ID NO: 2832 - protein, 79 aa, Homo sapiens
  MOD_RES (8)..(8): Any amino acid
  MOD_RES (40)..(40): Any amino acid
TCTVSGGXISSSSYYWGWIRQPPGKGLEWIGSIYYSGSTXYNPSLKSRVTISVDTSKNQFSLKLSSVTAADTAVYYCAR

SEQ ID NO: 2833 - protein, 85 aa, Homo sapiens
SETLSLTCTVSGGSISSSSYYWGWIRQPPGKGLEWIGSIYYSGNTYYNPSLKSRVTISVDTSKNQFSLKLSSVTAADTAVYYCAR

SEQ ID NO: 2834 - protein, 81 aa, Homo sapiens
LRLSCAASGFTFSSYGMHWVRQAPGKGLEWVAVISYDGSNKYYADSVKGRFTISRDNSKNTVYLQMNSLRAEDTAVYYCAK

SEQ ID NO: 2835 - protein, 81 aa, Homo sapiens
LRLSCAASGFTFSGYDMHWVRQAPGKGLEWVALICFDGKNKYYADFVEGRFIISRDNSQNTLFLQMHSLRAEDTAVYYCGR

SEQ ID NO: 2836 - protein, 80 aa, Homo sapiens
LRLSCAASGFTFSSYSMNWVRQAPGKGLEWVSSISSSSSYIYYADSVKGRFTISRDNAKNSLYLQMNSLRAEDTAVYYCA

SEQ ID NO: 2837 - protein, 81 aa, Homo sapiens; identical to SEQ ID NO: 2808

SEQ ID NO: 2838 - protein, 84 aa, Homo sapiens
GASVNVSCKASGYTFTGYYMHWVRQAPGQGLEWMGWINPNSGGTNYAQKFQGRVTMTRDTSITTAYMDLSRLRSDDTAVYYCAR

SEQ ID NO: 2839 - protein, 24 aa, Homo sapiens
VQLVQSGAEVKKPGSSVKVSCKTS

SEQ ID NO: 2840 - protein, 6 aa, Homo sapiens
LTCAVS

SEQ ID NO: 2841 - protein, 14 aa, Homo sapiens
  MOD_RES (1)..(3): Any amino acid
XXXGRSLRLSCEAS

SEQ ID NO: 2842 - protein, 8 aa, Homo sapiens
LRLSCAAS

SEQ ID NO: 2843 - protein, 5 aa, Homo sapiens
SCAAT

SEQ ID NO: 2844 - protein, 7 aa, Homo sapiens
RLSCVAS

SEQ ID NO: 2845 - protein, 8 aa, Homo sapiens
LRLSCAAS

SEQ ID NO: 2846 - protein, 6 aa, Homo sapiens
LTCTVS

SEQ ID NO: 2847 - protein, 25 aa, Homo sapiens
EVQLVESGGGWVQPGGSLRLSCEAS

SEQ ID NO: 2848 - protein, 25 aa, Homo sapiens
QVQLVESGGGVVRPGGSLRLSCEAS

SEQ ID NO: 2849 - protein, 24 aa, Homo sapiens
VQLVQSGAEVKKPGASVKVSCKAS

SEQ ID NO: 2850 - protein, 6 aa, Homo sapiens
ISCKVS

SEQ ID NO: 2851 - protein, 9 aa, Homo sapiens
TLSLTCAVS

SEQ ID NO: 2852 - protein, 25 aa, Homo sapiens
EVQLVESGGGLVQPGGSLRLACTAS

SEQ ID NO: 2853 - protein, 25 aa, Homo sapiens
EVQLVESGGGVVQPGGSLRLSCAAS

SEQ ID NO: 2854 - protein, 25 aa, Homo sapiens
EVQLVESGGGLVQPGGSLRLACTAS

SEQ ID NO: 2855 - protein, 11 aa, Homo sapiens
  MOD_RES (3)..(3): Any amino acid
GGXLRLSCSAS

SEQ ID NO: 2856 - protein, 8 aa, Homo sapiens
LRLSCAAS

SEQ ID NO: 2857 - protein, 7 aa, Homo sapiens
RLSCATS

SEQ ID NO: 2858 - protein, 7 aa, Homo sapiens
KVSCTAS

SEQ ID NO: 2859 - protein, 6 aa, Homo sapiens
VSCKAS

SEQ ID NO: 2860 - protein, 8 aa, Homo sapiens
LTLSCVGS

SEQ ID NO: 2861 - protein, 8 aa, Homo sapiens
LRLSCEAS

SEQ ID NO: 2862 - protein, 7 aa, Homo sapiens
RLSCAAS

SEQ ID NO: 2863 - protein, 25 aa, Homo sapiens
QVQLQESGPGLVKPSETLSLICSVS

SEQ ID NO: 2864 - protein, 9 aa, Homo sapiens
SVRVSCKDS

SEQ ID NO: 2865 - protein, 25 aa, Homo sapiens
EVQLVESGGGLVRPGGSLRLSCAPS

SEQ ID NO: 2866 - protein, 9 aa, Homo sapiens
SVRVSCKTS

SEQ ID NO: 2867 - protein, 8 aa, Homo sapiens
LRLSCAAS

SEQ ID NO: 2868 - protein, 6 aa, Homo sapiens
LTCTVS

SEQ ID NO: 2869 - protein, 8 aa, Homo sapiens
LRLSCSAS

SEQ ID NO: 2870 - protein, 8 aa, Homo sapiens
LRLSCAAS

SEQ ID NO: 2871 - protein, 7 aa, Homo sapiens
RLSCAAS

SEQ ID NO: 2872 - protein, 8 aa, Homo sapiens
LRLSCAAS

SEQ ID NO: 2873 - protein, 7 aa, Homo sapiens
  MOD_RES (4)..(4): Any amino acid
RLSXAAS

SEQ ID NO: 2874 - protein, 8 aa, Homo sapiens
LRLSCAAS

SEQ ID NO: 2875 - protein, 7 aa, Homo sapiens
  MOD_RES (5)..(5): Any amino acid
RLSCXAS

SEQ ID NO: 2876 - protein, 11 aa, Homo sapiens
WGVLRLSCAAS

SEQ ID NO: 2877 - protein, 8 aa, Homo sapiens
LRLSCAAS

SEQ ID NO: 2878 - protein, 8 aa, Homo sapiens
LRLSCAAS

SEQ ID NO: 2879 - protein, 6 aa, Homo sapiens
  MOD_RES (4)..(4): Any amino acid
LTCXVS

SEQ ID NO: 2880 - protein, 8 aa, Homo sapiens
LRLSCSAS

SEQ ID NO: 2881 - protein, 8 aa, Homo sapiens
LRLSCVAS

SEQ ID NO: 2882 - protein, 6 aa, Homo sapiens
LTCTVS

SEQ ID NO: 2883 - protein, 7 aa, Homo sapiens
RLSCAAS

SEQ ID NO: 2884 - protein, 8 aa, Homo sapiens
LRLSCAAS

SEQ ID NO: 2885 - protein, 15 aa, Homo sapiens
  MOD_RES (1)..(1): Any amino acid
XLELSEVSCKTSGYT

SEQ ID NO: 2886 - protein, 13 aa, Homo sapiens
  MOD_RES (4)..(4): Any amino acid
AELXTLSLTCNVS

SEQ ID NO: 2887 - protein, 11 aa, Homo sapiens
AGGLRLSCVAS

SEQ ID NO: 2888 - protein, 8 aa, Homo sapiens
LRLSCAAS

SEQ ID NO: 2889 - protein, 7 aa, Homo sapiens
RLSCAAS

SEQ ID NO: 2890 - protein, 7 aa, Homo sapiens
RLSCAAS

SEQ ID NO: 2891 - protein, 8 aa, Homo sapiens
LRLSCAAS

SEQ ID NO: 2892 - protein, 8 aa, Homo sapiens
LRLSCTAS

SEQ ID NO: 2893 - protein, 6 aa, Homo sapiens
LTCTVS

SEQ ID NO: 2894 - protein, 6 aa, Homo sapiens
VSCKAS

SEQ ID NO: 2895 - protein, 6 aa, Homo sapiens
VSCEAS

SEQ ID NO: 2896 - protein, 6 aa, Homo sapiens
LTCTVS

SEQ ID NO: 2897 - protein, 11 aa, Homo sapiens
SGTLSLTCAVS

SEQ ID NO: 2898 - protein, 6 aa, Homo sapiens
LTCIVS

SEQ ID NO: 2899 - protein, 7 aa, Homo sapiens
RLSYEVS

SEQ ID NO: 2900 - protein, 8 aa, Homo sapiens
LRLSCAAS

SEQ ID NO: 2901 - protein, 6 aa, Homo sapiens
LTCAVS

SEQ ID NO: 2902 - protein, 8 aa, Homo sapiens
LRLSCVGS

SEQ ID NO: 2903 - protein, 6 aa, Homo sapiens
VSCKGS

SEQ ID NO: 2904 - protein, 9 aa, Homo sapiens
SVRVSCKGS

SEQ ID NO: 2905 - protein, 7 aa, Homo sapiens
RLSCAAS

SEQ ID NO: 2906 - protein, 13 aa, Homo sapiens
  MOD_RES (1)..(2): Any amino acid
XXGGSLRLSCAAS

SEQ ID NO: 2907 - protein, 9 aa, Homo sapiens
SVRVSCKAS

SEQ ID NO: 2908 - protein, 8 aa, Homo sapiens
LRLSCAVS

SEQ ID NO: 2909 - protein, 7 aa, Homo sapiens
  MOD_RES (1)..(1): Any amino acid
XVSCKAS

SEQ ID NO: 2910 - protein, 8 aa, Homo sapiens
LRLSCAAS

SEQ ID NO: 2911 - protein, 8 aa, Homo sapiens
LRLSCTAS

SEQ ID NO: 2912 - protein, 6 aa, Homo sapiens
LTCTVF

SEQ ID NO: 2913 - protein, 6 aa, Homo sapiens
VSCRAS

SEQ ID NO: 2914 - protein, 8 aa, Homo sapiens
VRVSCKAS

SEQ ID NO: 2915 - protein, 9 aa, Homo sapiens
  MOD_RES (2)..(4): Any amino acid
IXXXSCKGS

SEQ ID NO: 2916 - protein, 7 aa, Homo sapiens
RLSCAVS

SEQ ID NO: 2917 - protein, 6 aa, Homo sapiens
VSCKAS

SEQ ID NO: 2918 - protein, 9 aa, Homo sapiens
SVRVSCKGS

SEQ ID NO: 2919 - protein, 8 aa, Homo sapiens
LRLSCAAS

SEQ ID NO: 2920 - protein, 8 aa, Homo sapiens
LRLSCAAS

SEQ ID NO: 2921 - protein, 8 aa, Homo sapiens
LRLSCAAS

SEQ ID NO: 2922 - protein, 25 aa, Homo sapiens
EVQLVESGGGLVKPGGSLRVSCAAS

SEQ ID NO: 2923 - protein, 8 aa, Homo sapiens
LRLSCAAS

SEQ ID NO: 2924 - protein, 12 aa, Homo sapiens
  MOD_RES (3)..(3): Any amino acid
SMXLGDVSCKAS

SEQ ID NO: 2925 - protein, 13 aa, Homo sapiens
RGGESLKISCQGL

SEQ ID NO: 2926 - protein, 6 aa, Homo sapiens
VSCKAS

SEQ ID NO: 2927 - protein, 11 aa, Homo sapiens
SETLSLTCSVS

SEQ ID NO: 2928 - protein, 22 aa, Homo sapiens
LQESGPGLVKPSETLSLTCTVS

SEQ ID NO: 2929 - protein, 13 aa, Homo sapiens
QPGGSLRLSCAAS

SEQ ID NO: 2930 - protein, 12 aa, Homo sapiens
SGGSLRLSCVGS

SEQ ID NO: 2931 - protein, 25 aa, Homo sapiens
EVQLLESGGGLVQPGGSLRLSCAAS

SEQ ID NO: 2932 - protein, 24 aa, Homo sapiens
VQLVQSGAEVKKPGSSVRVSCKAS

SEQ ID NO: 2933 - protein, 11 aa, Homo sapiens
SETLSLTCTVS

SEQ ID NO: 2934 - protein, 6 aa, Homo sapiens
VSCKAS

SEQ ID NO: 2935 - protein, 9 aa, Homo sapiens
SVTVSCKAS

SEQ ID NO: 2936 - protein, 25 aa, Homo sapiens
QVQLVESGGGVVQPGRSLRLSCAAS

SEQ ID NO: 2937 - protein, 8 aa, Homo sapiens
LRLSCAPS

SEQ ID NO: 2938 - protein, 13 aa, Homo sapiens
QPGGSLRLSCEAS

SEQ ID NO: 2939 - protein, 24 aa, Homo sapiens
VQLVESGGGLVQPGRSLRLSCAAS

SEQ ID NO: 2940 - protein, 24 aa, Homo sapiens
VQLVQSGAELKKPGASVKLSCKAS

SEQ ID NO: 2941 - protein, 25 aa, Homo sapiens
EVQLVESGGGLVEPGGSLRLSCTGS

SEQ ID NO: 2942 - protein, 23 aa, Homo sapiens
QLQESGPGLVKPSETLSLTCTVS

SEQ ID NO: 2943 - protein, 23 aa, Homo sapiens
QLQESGPGLVKPSETLSLTCTVS

SEQ ID NO: 2944 - protein, 11 aa, Homo sapiens
  MOD_RES (1)..(2): Any amino acid
XXGLKCLLQAS

SEQ ID NO: 2945 - protein, 23 aa, Homo sapiens
QLQESGPGLVKPSETLSLTCTVS

SEQ ID NO: 2946 - protein, 8 aa, Homo sapiens
LRLSCAAS

SEQ ID NO: 2947 - protein, 6 aa, Homo sapiens
LTCTVS

SEQ ID NO: 2948 - protein, 8 aa, Homo sapiens
LRLSCAAS

SEQ ID NO: 2949 - protein, 11 aa, Homo sapiens
SETLSLTCTVS

SEQ ID NO: 2950 - protein, 8 aa, Homo sapiens
LRLSCTTS

SEQ ID NO: 2951 - protein, 9 aa, Homo sapiens
  MOD_RES (3)..(3): Any amino acid
  MOD_RES (5)..(5): Any amino acid
TLXLXCTVS

SEQ ID NO: 2952 - protein, 8 aa, Homo sapiens
LRLSCAAS

SEQ ID NO: 2953 - protein, 11 aa, Homo sapiens
GASVKVSCKAS

SEQ ID NO: 2954 - protein, 6 aa, Homo sapiens
LTCTVS

SEQ ID NO: 2955 - protein, 8 aa, Homo sapiens
LRLSCAAS

SEQ ID NO: 2956 - protein, 8 aa, Homo sapiens
LRLSCAAS

SEQ ID NO: 2957 - protein, 6 aa, Homo sapiens
VSCKAS

SEQ ID NO: 2958 - protein, 9 aa, Homo sapiens
SMRLSCAAS

SEQ ID NO: 2959 - protein, 14 aa, Homo sapiens
  MOD_RES (1)..(2): Any amino acid
  MOD_RES (5)..(5): Any amino acid
XXSFXTLSLTCTVS

SEQ ID NO: 2960 - protein, 12 aa, Homo sapiens
  MOD_RES (1)..(2): Any amino acid
XXESLRISCKGS

SEQ ID NO: 2961 - protein, 8 aa, Homo sapiens
LRLSCAAS

SEQ ID NO: 2962 - protein, 7 aa, Homo sapiens
RLSCAAS

SEQ ID NO: 2963 - protein, 8 aa, Homo sapiens
LRLSCAAS

SEQ ID NO: 2964 - protein, 25 aa, Homo sapiens
EVQLVESGGGLIQPGGSLRLSCAAS

SEQ ID NO: 2965 - protein, 24 aa, Homo sapiens
VQLVQSGAEVKKPGASVKVSCKAS

SEQ ID NO: 2966 - protein, 7 aa, Homo sapiens
RLSCAAS

SEQ ID NO: 2967 - protein, 7 aa, Homo sapiens
SLTCTVS

SEQ ID NO: 2968 - protein, 11 aa, Homo sapiens
SETLSLTCTVS

SEQ ID NO: 2969 - protein, 6 aa, Homo sapiens
LTCTVS

SEQ ID NO: 2970 - protein, 8 aa, Homo sapiens
LRLSCAAS

SEQ ID NO: 2971 - protein, 7 aa, Homo sapiens
RLSCAAS

SEQ ID NO: 2972 - protein, 7 aa, Homo sapiens
RLSCAAS

SEQ ID NO: 2973 - protein, 25 aa, Homo sapiens
EVQLVESGGGLVKPGGSLRLSCAAS

SEQ ID NO: 2974 - protein, 6 aa, Homo sapiens
LTCTVS

SEQ ID NO: 2975 - protein, 25 aa, Homo sapiens [sequence omitted]

SEQ ID NO: 2976 - protein, 6 aa, Homo sapiens
LTCTVS

SEQ ID NO: 2977 - protein, 6 aa, Homo sapiens
LTCTVS

SEQ ID NO: 2978 - protein, 25 aa, Homo sapiens
EVQLVQSGVEVKKPGESLKISCKGS

SEQ ID NO: 2979 - protein, 6 aa, Homo sapiens
LTCTVS

SEQ ID NO: 2980 - protein, 6 aa, Homo sapiens
LTCTVS

SEQ ID NO: 2981 - protein, 6 aa, Homo sapiens
LTCTVS

SEQ ID NO: 2982 - protein, 8 aa, Homo sapiens
LRLSCAAS

SEQ ID NO: 2983 - protein, 8 aa, Homo sapiens
LRLSCAAS

SEQ ID NO: 2984 - protein, 12 aa, Homo sapiens
  MOD_RES (1)..(1): Any amino acid
  MOD_RES (3)..(3): Any amino acid
XAXDPVLTCTVS

SEQ ID NO: 2985 - protein, 8 aa, Homo sapiens
LRLSCAAS

SEQ ID NO: 2986 - protein, 7 aa, Homo sapiens
RLSCAAS

SEQ ID NO: 2987 - protein, 7 aa, Homo sapiens
RLSCAAS

SEQ ID NO: 2988 - protein, 8 aa, Homo sapiens
LRLSCAAS

SEQ ID NO: 2989 - protein, 24 aa, Homo sapiens
VQLVESGGGVVQPGGSLRLSCAAS

SEQ ID NO: 2990 - protein, 24 aa, Homo sapiens
VQLVESGGGLVKPGGSLRLSCAVS

SEQ ID NO: 2991 - protein, 23 aa, Homo sapiens
QLQESGPGLVKPSETLSLTCTVS

SEQ ID NO: 2992 - protein, 8 aa, Homo sapiens
LRLSCAAS

SEQ ID NO: 2993 - protein, 7 aa, Homo sapiens
RLSCAAS

SEQ ID NO: 2994 - protein, 7 aa, Homo sapiens
RLSCAAS

SEQ ID NO: 2995 - protein, 12 aa, Homo sapiens
RSETLSLTCTVS

SEQ ID NO: 2996 - protein, 25 aa, Homo sapiens
QVQLQESGPGLVKPSQTLSLTCTVS

SEQ ID NO: 2997 - protein, 6 aa, Homo sapiens
LTCTVS

SEQ ID NO: 2998 - protein, 8 aa, Homo sapiens
LRLSCAAS

SEQ ID NO: 2999 - protein, 12 aa, Homo sapiens
  MOD_RES (1)..(3): Any amino acid
XXXSLRISCKTS

SEQ ID NO: 3000 - protein, 9 aa, Homo sapiens
TLSLTCTVS

SEQ ID NO: 3001 - protein, 6 aa, Homo sapiens
VSCKAS

SEQ ID NO: 3002 - protein, 8 aa, Homo sapiens
LRLSCAAS

SEQ ID NO: 3003 - protein, 12 aa, Homo sapiens
PSETLSLTCTVS

SEQ ID NO: 3004 - protein, 7 aa, Homo sapiens
RLSCAAS

SEQ ID NO: 3005 - protein, 11 aa, Homo sapiens
SETLSLTCTVS

SEQ ID NO: 3006 - protein, 8 aa, Homo sapiens
LSLTCTVS

SEQ ID NO: 3007 - protein, 5 aa, Homo sapiens
TCTVS

SEQ ID NO: 3008 - protein, 11 aa, Homo sapiens
SETLSLTCTVS

SEQ ID NO: 3009 - protein, 8 aa, Homo sapiens
LRLSCAAS

SEQ ID NO: 3010 - protein, 8 aa, Homo sapiens
LRLSCAAS

SEQ ID NO: 3011 - protein, 8 aa, Homo sapiens
LRLSCAAS

SEQ ID NO: 3012 - protein, 8 aa, Homo sapiens
LRLSCAAS

SEQ ID NO: 3013 - protein, 11 aa, Homo sapiens
GASVNVSCKAS

SEQ ID NO: 3014 - protein, 8 aa, Homo sapiens
GGTFSSYA

SEQ ID NO: 3015 - protein, 8 aa, Homo sapiens
GASIRNYY

SEQ ID NO: 3016 - protein, 8 aa, Homo sapiens
GFIFSSFA

SEQ ID NO: 3017 - protein, 8 aa, Homo sapiens
GFTLSSYG

SEQ ID NO: 3018 - protein, 8 aa, Homo sapiens
GFTFSGSS

SEQ ID NO: 3019 - protein, 8 aa, Homo sapiens
GFAFNTYA

SEQ ID NO: 3020 - protein, 8 aa, Homo sapiens
RFNFNNYA

SEQ ID NO: 3021 - protein, 8 aa, Homo sapiens
GASIRSYY

SEQ ID NO: 3022 - protein, 8 aa, Homo sapiens
GYSVTSYW

SEQ ID NO: 3023 - protein, 8 aa, Homo sapiens
GFTFSLYW

SEQ ID NO: 3024 - protein, 8 aa, Homo sapiens
GFTLNNYG

SEQ ID NO: 3025 - protein, 8 aa, Homo sapiens
GYTFRNFD

SEQ ID NO: 3026 - protein, 8 aa, Homo sapiens
GYSFTSYW

SEQ ID NO: 3027 - protein, 10 aa, Homo sapiens
GGSISRGGFT

SEQ ID NO: 3028 - protein, 8 aa, Homo sapiens
GSIFTIPW

SEQ ID NO: 3029 - protein, 8 aa, Homo sapiens
GFTFNNYW

SEQ ID NO: 3030 - protein, 8 aa, Homo sapiens
GSIFNIPW

SEQ ID NO: 3031 - protein, 8 aa, Homo sapiens
GFIFSHYA

SEQ ID NO: 3032 - protein, 8 aa, Homo sapiens
GFTFRDFY

SEQ ID NO: 3033 - protein, 8 aa, Homo sapiens
GFTFSGYW

SEQ ID NO: 3034 - protein, 8 aa, Homo sapiens
GYTFNMHY

SEQ ID NO: 3035 - protein, 8 aa, Homo sapiens
GYTFTTYS

SEQ ID NO: 3036 - protein, 8 aa, Homo sapiens
GFIFSNYA

SEQ ID NO: 3037 - protein, 8 aa, Homo sapiens
GFTFSNSA

SEQ ID NO: 3038 - protein, 8 aa, Homo sapiens
GFSFSTYW

SEQ ID NO: 3039 - protein, 10 aa, Homo sapiens
GGSVTSGIYH

SEQ ID NO: 3040 - protein, 8 aa, Homo sapiens
GESLSGYF

SEQ ID NO: 3041 - protein, 8 aa, Homo sapiens
EDTFSTYV

SEQ ID NO: 3042 - protein, 8 aa, Homo sapiens
GFTFSHYW

SEQ ID NO: 3043 - protein, 8 aa, Homo sapiens
EDTFSTYV

SEQ ID NO: 3044 - protein, 8 aa, Homo sapiens
GFTFSSYG

SEQ ID NO: 3045 - protein, 10 aa, Homo sapiens
GASITNADSW

SEQ ID NO: 3046 - protein, 8 aa, Homo sapiens
GFSFSNYG

SEQ ID NO: 3047 - protein, 8 aa, Homo sapiens
GYTFTGYY

SEQ ID NO: 3048 - protein, 8 aa, Homo sapiens
GFTFDDSA

SEQ ID NO: 3049 - protein, 8 aa, Homo sapiens
GFTFEHYA

SEQ ID NO: 3050 - protein, 8 aa, Homo sapiens
GLIFSNYY

SEQ ID NO: 3051 - protein, 8 aa, Homo sapiens
GFTFDDYA

SEQ ID NO: 3052 - protein, 8 aa, Homo sapiens
GFTFRVYG

SEQ ID NO: 3053 - protein, 7 aa, Homo sapiens
YTFTTYW

SEQ ID NO: 3054 - protein, 8 aa, Homo sapiens
GFTFNDYA

SEQ ID NO: 3055 - protein, 8 aa, Homo sapiens
GFIFDDYA

SEQ ID NO: 3056 - protein, 8 aa, Homo sapiens
GFIFTSYW

SEQ ID NO: 3057 - protein, 8 aa, Homo sapiens
GFSFEEYG

SEQ ID NO: 3058 - protein, 8 aa, Homo sapiens
GFSFSSYG

SEQ ID NO: 3059 - protein, 10 aa, Homo sapiens
GDSISSGGYY

SEQ ID NO: 3060 - protein, 8 aa, Homo sapiens
GFTFDDAA

SEQ ID NO: 3061 - protein, 8 aa, Homo sapiens
GFTFSKYG

SEQ ID NO: 3062 - protein, 10 aa, Homo sapiens
GGSISGGNYY

SEQ ID NO: 3063 - protein, 8 aa, Homo sapiens
GFTFSSDG

SEQ ID NO: 3064 - protein, 8 aa, Homo sapiens
GFTFSDYY

SEQ ID NO: 3065 - protein, 8 aa, Homo sapiens
FTRYFIHW

SEQ ID NO: 3066 - protein, 10 aa, Homo sapiens
  MOD_RES (8)..(8): Any amino acid
GGSITTGXYY

SEQ ID NO: 3067 - protein, 8 aa, Homo sapiens
GFTFSSYD

SEQ ID NO: 3068 - protein, 8 aa, Homo sapiens
GFTFSSYG

SEQ ID NO: 3069 - protein, 8 aa, Homo sapiens
GFTFSTYA

SEQ ID NO: 3070 - protein, 8 aa, Homo sapiens
GFAFSNYV

SEQ ID NO: 3071 - protein, 8 aa, Homo sapiens
GFTFSRYW

SEQ ID NO: 3072 - protein, 8 aa, Homo sapiens
GFTFGDYA

SEQ ID NO: 3073 - protein, 9 aa, Homo sapiens
SYSITSGYY

SEQ ID NO: 3074 - protein, 8 aa, Homo sapiens
GYTFTSYG

SEQ ID NO: 3075 - protein, 8 aa, Homo sapiens
GYRFTDYY

SEQ ID NO: 3076 - protein, 8 aa, Homo sapiens
GASISSYY

SEQ ID NO: 3077 - protein, 9 aa, Homo sapiens
GASVTSNNW

SEQ ID NO: 3078 - protein, 10 aa, Homo sapiens
GDSIITSTYY

SEQ ID NO: 3079 - protein, 8 aa, Homo sapiens
GFTVSSNF

SEQ ID NO: 3080 - protein, 8 aa, Homo sapiens
GFIFSEYW

SEQ ID NO: 3081 - protein, 9 aa, Homo sapiens
GSSISRGYY

SEQ ID NO: 3082 - protein, 8 aa, Homo sapiens
GFTFHYAW

SEQ ID NO: 3083 - protein, 8 aa, Homo sapiens
GGSFNNFA

SEQ ID NO: 3084 - protein, 8 aa, Homo sapiens
GGDFNNFA

SEQ ID NO: 3085 - protein, 8 aa, Homo sapiens
GFTFSTYA

SEQ ID NO: 3086 - protein, 8 aa, Homo sapiens
GFNLHSYE

SEQ ID NO: 3087 - protein, 6 aa, Homo sapiens
TFTDFY

SEQ ID NO: 3088 - protein, 8 aa, Homo sapiens
GFTFTNAW

SEQ ID NO: 3089 - protein, 8 aa, Homo sapiens
GAIFNNYA

SEQ ID NO: 3090 - protein, 8 aa, Homo sapiens
GFPFNNFA

SEQ ID NO: 3091 - protein, 8 aa, Homo sapiens
GYRLTRYY

SEQ ID NO: 3092 - protein, 8 aa, Homo sapiens
GFTFSTYW

SEQ ID NO: 3093 - protein, 8 aa, Homo sapiens
GFSFSDSE

SEQ ID NO: 3094 - protein, 8 aa, Homo sapiens
GGSISTHY

SEQ ID NO: 3095 - protein, 8 aa, Homo sapiens
DYTFTSYG

SEQ ID NO: 3096 - protein, 8 aa, Homo sapiens
GGAFRNFA

SEQ ID NO: 3097 - protein, 8 aa, Homo sapiens
GRNFNNFA

SEQ ID NO: 3098 - protein, 8 aa, Homo sapiens
GLSFSDYF

SEQ ID NO: 3099 - protein, 8 aa, Homo sapiens
GGTFNNFA

SEQ ID NO: 3100 - protein, 8 aa, Homo sapiens
GGDFNNFA

SEQ ID NO: 3101 - protein, 8 aa, Homo sapiens
GFAFSSYG

SEQ ID NO: 3102 - protein, 8 aa, Homo sapiens
GFTFTTSA

SEQ ID NO: 3103 - protein, 8 aa, Homo sapiens
GFSFSSYW

SEQ ID NO: 3104 - protein, 8 aa, Homo sapiens
GFTFSAAW

SEQ ID NO: 3105 - protein, 8 aa, Homo sapiens
GFIFSNYW

SEQ ID NO: 3106 - protein, 8 aa, Homo sapiens
GGSMSPFY

SEQ ID NO: 3107 - protein, 8 aa, Homo sapiens
GGTFTNYA

SEQ ID NO: 3108 - protein, 8 aa, Homo sapiens
GYNFAGYW

SEQ ID NO: 3109 - protein, 8 aa, Homo sapiens
GYTFTGYF

SEQ ID NO: 3110 - protein, 10 aa, Homo sapiens
GVAVNTDLYY

SEQ ID NO: 3111 - protein, 10 aa, Homo sapiens
GGSISGSGYF

SEQ ID NO: 3112 - protein, 8 aa, Homo sapiens
GFSFSSYW

SEQ ID NO: 3113 - protein, 7 aa, Homo sapiens
VSSDTAA

SEQ ID NO: 3114 - protein, 8 aa, Homo sapiens
GFTFSNYP

SEQ ID NO: 3115 - protein, 8 aa, Homo sapiens
GSTSTSFP

SEQ ID NO: 3116 - protein, 8 aa, Homo sapiens
GGTFDTYA

SEQ ID NO: 3117 - protein, 10 aa, Homo sapiens
GGSFSSNAYY

SEQ ID NO: 3118 - protein, 8 aa, Homo sapiens
GVTFSSYA

SEQ ID NO: 3119 - protein, 8 aa, Homo sapiens
GGTFSSRA

SEQ ID NO: 3120 - protein, 8 aa, Homo sapiens
GFTFRSFA

SEQ ID NO: 3121 - protein, 8 aa, Homo sapiens
GFTFTHAW

SEQ ID NO: 3122 - protein, 8 aa, Homo sapiens
GFSFSDYY

SEQ ID NO: 3123 - protein, 8 aa, Homo sapiens
GFIFSSYW

SEQ ID NO: 3124 - protein, 8 aa, Homo sapiens
GFNFDDYA

SEQ ID NO: 3125 - protein, 8 aa, Homo sapiens
GYTFSGYY

SEQ ID NO: 3126 - protein, 8 aa, Homo sapiens
GFPFINAY

SEQ ID NO: 3127 - protein, 10 aa, Homo sapiens
GASMNSEAFY

SEQ ID NO: 3128 - protein, 10 aa, Homo sapiens
GGSISSSSYY

SEQ ID NO: 3129 - protein, 8 aa, Homo sapiens
GYTFTGYY

SEQ ID NO: 3130 - protein, 10 aa, Homo sapiens
GGSISSSSYY

SEQ ID NO: 3131 - protein, 8 aa, Homo sapiens
GFRFSTFA

SEQ ID NO: 3132 - protein, 10 aa, Homo sapiens
GGSISSSSYY

SEQ ID NO: 3133 - protein, 8 aa, Homo sapiens
GFTFSSYG

SEQ ID NO: 3134 - protein, 8 aa, Homo sapiens
GGSISYYY

SEQ ID NO: 3135 - protein, 8 aa, Homo sapiens
GFTFGDYA

SEQ ID NO: 3136 - protein, 10 aa, Homo sapiens
GGSISSGGYY

SEQ ID NO: 3137 - protein, 8 aa, Homo sapiens
GFTFDDYA

SEQ ID NO: 3138 - protein, 8 aa, Homo sapiens
GYTFIGYY

SEQ ID NO: 3139 - protein, 10 aa, Homo sapiens
GGSISSSSYY

SEQ ID NO: 3140 - protein, 10 aa, Homo sapiens
GGSISSSSYY

SEQ ID NO: 3141 - protein, 8 aa, Homo sapiens
GFTFSTYG

SEQ ID NO: 3142 - protein, 8 aa, Homo sapiens
GFKFSDYG

SEQ ID NO: 3143 - protein, 8 aa, Homo sapiens
GYTFTSYG

SEQ ID NO: 3144 - protein, 8 aa, Homo sapiens
GFTFSDYY

SEQ ID NO: 3145 - protein, 10 aa, Homo sapiens
GGSISSGGYY

SEQ ID NO: 3146 - protein, 8 aa, Homo sapiens
GYSFTSYW

SEQ ID NO: 3147 - protein, 8 aa, Homo sapiens
GFTFSSYG

SEQ ID NO: 3148 - protein, 8 aa, Homo sapiens
GFTFDDYA

SEQ ID NO: 3149 - protein, 8 aa, Homo sapiens
GFTFSSYW

SEQ ID NO: 3150 - protein, 8 aa, Homo sapiens
GFSVRSNY

SEQ ID NO: 3151 - protein, 8 aa, Homo sapiens
GYTFTGYY

SEQ ID NO: 3152 - protein, 8 aa, Homo sapiens
GFTFDDYA

SEQ ID NO: 3153 - protein, 10 aa, Homo sapiens
  MOD_RES (10)..(10): Any amino acid
GGSISSGGYX

SEQ ID NO: 3154 - protein, 8 aa, Homo sapiens
GGSISNYY

SEQ ID NO: 3155 - protein, 8 aa, Homo sapiens
GYTFTGYY

SEQ ID NO: 3156 - protein, 10 aa, Homo sapiens
GGSISSSSYY

SEQ ID NO: 3157 - protein, 8 aa, Homo sapiens
GFTFSSYD

SEQ ID NO: 3158 - protein, 8 aa, Homo sapiens
GFTFDDYA

SEQ ID NO: 3159 - protein, 8 aa, Homo sapiens
GFTFSSYG

SEQ ID NO: 3160 - protein, 8 aa, Homo sapiens
GFIFNNAW

SEQ ID NO: 3161 - protein, 10 aa, Homo sapiens
GGSISSSNYY

SEQ ID NO: 3162 - protein, 8 aa, Homo sapiens
GFTFSSYP

SEQ ID NO: 3163 - protein, 10 aa, Homo sapiens
GGSISSSSYY

SEQ ID NO: 3164 - protein, 10 aa, Homo sapiens
GGSISSSSYY

SEQ ID NO: 3165 - protein, 8 aa, Homo sapiens
GYSFTSYW

SEQ ID NO: 3166 - protein, 10 aa, Homo sapiens
  MOD_RES (8)..(8): Any amino acid
GGSISSSXYY

SEQ ID NO: 3167 - protein, 10 aa, Homo sapiens
DGSISSSSYY

SEQ ID NO: 3168 - protein, 10 aa, Homo sapiens
GGSISSGGYY

SEQ ID NO: 3169 - protein, 8 aa, Homo sapiens
GFTFSRYG

SEQ ID NO: 3170 - protein, 8 aa, Homo sapiens
GFTFSDYY

SEQ ID NO: 3171 - protein, 10 aa, Homo sapiens
GGSIDTADYY

SEQ ID NO: 3172 - protein, 8 aa, Homo sapiens
GFTFSDYY

SEQ ID NO: 3173 - protein, 8 aa, Homo sapiens
GFTFSSYS

SEQ ID NO: 3174 - protein, 8 aa, Homo sapiens
GFTFSSYS

SEQ ID NO: 3175 - protein, 8 aa, Homo sapiens
GFTFSDYY

SEQ ID NO: 3176 - protein, 8 aa, Homo sapiens
GFTFDDYA

SEQ ID NO: 3177 - protein, 8 aa, Homo sapiens
GFTFSDYY

SEQ ID NO: 3178 - protein, 10 aa, Homo sapiens
GGSISSSSYY

SEQ ID NO: 3179 - protein, 8 aa, Homo sapiens
GFTFSTYG

SEQ ID NO: 3180 - protein, 8 aa, Homo sapiens
GFTFSSYE

SEQ ID NO: 3181 - protein, 8 aa, Homo sapiens
GFTFSSYS

SEQ ID NO: 3182 - protein, 8 aa, Homo sapiens
GYTFTSYY

SEQ ID NO: 3183 - protein, 10 aa, Homo sapiens
GGSISSSSYY

SEQ ID NO: 3184 - protein, 10 aa, Homo sapiens
GGSISSGDYY

SEQ ID NO: 3185 - protein, 8 aa, Homo sapiens
GDSISNYY

SEQ ID NO: 3186 - protein, 8 aa, Homo sapiens
GFTFSDYY

SEQ ID NO: 3187 - protein, 8 aa, Homo sapiens
GYRFTTYW

SEQ ID NO: 3188 - protein, 8 aa, Homo sapiens
GGSISSYF

SEQ ID NO: 3189 - protein, 8 aa, Homo sapiens
GYTFTGYY

SEQ ID NO: 3190 - protein, 8 aa, Homo sapiens
GFTFSDYY

SEQ ID NO: 3191 - protein, 10 aa, Homo sapiens
GGSISSSSYY

SEQ ID NO: 3192 - protein, 8 aa, Homo sapiens
GFTFSSYS

SEQ ID NO: 3193 - protein, 10 aa, Homo sapiens
GGSISSSSYY

SEQ ID NO: 3194 - protein, 10 aa, Homo sapiens
  MOD_RES (6)..(7): Any amino acid
GGSISXXGYY

SEQ ID NO: 3195 - protein, 10 aa, Homo sapiens
  MOD_RES (3)..(3): Any amino acid
GGXISSSSYY

SEQ ID NO: 3196 - protein, 10 aa, Homo sapiens
GGSISSSSYY

SEQ ID NO: 3197 - protein, 8 aa, Homo sapiens
GFTFSSYG

SEQ ID NO: 3198 - protein, 8 aa, Homo sapiens
GFTFSGYD

SEQ ID NO: 3199 - protein, 8 aa, Homo sapiens
GFTFSSYS

SEQ ID NO: 3200 - protein, 8 aa, Homo sapiens
GFTFSDYY

SEQ ID NO: 3201 - protein, 8 aa, Homo sapiens
GYTFTGYY

SEQ ID NO: 3202 - protein, 17 aa, Homo sapiens
ISWVRQAPGQGLEWMGG

SEQ ID NO: 3203 - protein, 17 aa, Homo sapiens
ISWVRQAPGQGLQWMGG

SEQ ID NO: 3204 - protein, 17 aa, Homo sapiens
WSWIRQPPGKGLEWIGS

SEQ ID NO: 3205 - protein, 17 aa, Homo sapiens
MHWVRQVPGKGLEWVSG

SEQ ID NO: 3206 - protein, 17 aa, Homo sapiens
MHWVRQAPGKGLEWVAL

SEQ ID NO: 3207 - protein, 17 aa, Homo sapiens
MHWVRQAPGKGLEWVAL

SEQ ID NO: 3208 - protein, 10 aa, Homo sapiens
  MOD_RES (2)..(2): Any amino acid
  MOD_RES (8)..(9): Any amino acid
PXEGLEWXXE

SEQ ID NO: 3209 - protein, 17 aa, Homo sapiens
IHWVRQAPGKGLEWVGR

SEQ ID NO: 3210 - protein, 17 aa, Homo sapiens
MHWVRQAPGKGLEWVAL

SEQ ID NO: 3211 - protein, 17 aa, Homo sapiens
MHWVRQAPGKGLEWVAV

SEQ ID NO: 3212 - protein, 17 aa, Homo sapiens
WSWIRQPPGKGLEWIGS

SEQ ID NO: 3213 - protein, 17 aa, Homo sapiens
IGWVRQMPGKGLEWMGV

SEQ ID NO: 3214 - protein, 17 aa, Homo sapiens
MGWVRQAPGKGLEWVAT

SEQ ID NO: 3215 - protein, 17 aa, Homo sapiens
MHWVRQAPGRGLEWVAV

SEQ ID NO: 3216 - protein, 17 aa, Homo sapiens
INWVRQAPGQGLEWMGW

SEQ ID NO: 3217 - protein, 17 aa, Homo sapiens
IGWVRQMPGKGLEWMGI

SEQ ID NO: 3218 - protein, 17 aa, Homo sapiens
WSWIRQPPGKALEWIGY

SEQ ID NO: 3219 - protein, 17 aa, Homo sapiens
MGWVRQAPGKGLEWVAN

SEQ ID NO: 3220 - protein, 8 aa, Homo sapiens
KGLEWIGE

SEQ ID NO: 3221 - protein, 17 aa, Homo sapiens
MSWVRQTPGKGLEWVAN

SEQ ID NO: 3222 - protein, 17 aa, Homo sapiens
MSWVRQGPGKGLEWVAN

SEQ ID NO: 3223 - protein, 17 aa, Homo sapiens
MNWARQAPGKGLEWVSG

SEQ ID NO: 3224 - protein, 17 aa, Homo sapiens
MSWIRQVPGKGLEWVSY

SEQ ID NO: 3225 - protein, 17 aa, Homo sapiens
WSWVRQPPGKGLEWLGY

SEQ ID NO: 3226 - protein, 17 aa, Homo sapiens
  MOD_RES (2)..(2): Any amino acid
  MOD_RES (6)..(6): Any amino acid
MXWVRXAPGKGLEWVAT

SEQ ID NO: 3227 - protein, 17 aa, Homo sapiens
IHWVRQAPGQGLEWMGF

SEQ ID NO: 3228 - protein, 17 aa, Homo sapiens
MNWVRQAPGQGLEWMGW

SEQ ID NO: 3229 - protein, 17 aa, Homo sapiens
IHWVRQAPGKGLDWVSG

SEQ ID NO: 3230 - protein, 17 aa, Homo sapiens
MSWVRQAPGKGLEWVSS

SEQ ID NO: 3231 - protein, 13 aa, Homo sapiens
  MOD_RES (4)..(5): Any amino acid
RQPXXKGLEWLAY

SEQ ID NO: 3232 - protein, 17 aa, Homo sapiens
MNWVRQIPGKGLEWVAN

SEQ ID NO: 3233 - protein, 17 aa, Homo sapiens
WTWIRQPPGKGLEWIGY

SEQ ID NO: 3234 - protein, 17 aa, Homo sapiens
WNWIRQSPGKGLEWIGE

SEQ ID NO: 3235 - protein, 17 aa, Homo sapiens
MHWVRQAPGQGLEWMGE

SEQ ID NO: 3236 - protein, 17 aa, Homo sapiens
VAWLRQAPEKGLEWLAQ

SEQ ID NO: 3237 - protein, 17 aa, Homo sapiens
MHWVRQAPGQGLEWMGE

SEQ ID NO: 3238 - protein, 17 aa, Homo sapiens
MHWVRQAPGKGLEWVSL

SEQ ID NO: 3239 - protein, 17 aa, Homo sapiens
WNWIRQSPGKGLEWIGY

SEQ ID NO: 3240 - protein, 17 aa, Homo sapiens
MHWVRQAPGKGLEWVAV

SEQ ID NO: 3241 - protein, 17 aa, Homo sapiens
VHWVRQAPGQGLEWMGW

SEQ ID NO: 3242 - protein, 17 aa, Homo sapiens
IHWVRQPPGKGLEWVSS

SEQ ID NO: 3243 - protein, 17 aa, Homo sapiens
MHWVRQAPGKGLEWVSL

SEQ ID NO: 3244 - protein, 8 aa, Homo sapiens
  MOD_RES (5)..(6): Any amino acid
KGLEXXSY

SEQ ID NO: 3245 - protein, 17 aa, Homo sapiens
MSWIRQAPGKGLEGVSY

SEQ ID NO: 3246 - protein, 17 aa, Homo sapiens
MHWVRQAPGKGLEWVSG

SEQ ID NO: 3247 - protein, 17 aa, Homo sapiens
FHWVRQAPGKGLEWVAA

SEQ ID NO: 3248 - protein, 17 aa, Homo sapiens
LGWVRQMPGEGLEWMGI

SEQ ID NO: 3249 - protein, 4 aa, Homo sapiens
WVAV

SEQ ID NO: 3250 - protein, 17 aa, Homo sapiens
CGWIRQPPGKGLEWVGS

SEQ ID NO: 3251 - protein, 17 aa, Homo sapiens
MHWVRQAPRKGLEWVST

SEQ ID NO: 3252 - protein, 17 aa, Homo sapiens
MYWVRQAPGKGLEWVAG

SEQ ID NO: 3253 - protein, 17 aa, Homo sapiens
MHWVRQAPGKGLVWVSR

SEQ ID NO: 3254 - protein, 17 aa, Homo sapiens
MHWVRQAPGKGPEWVSF

SEQ ID NO: 3255 - protein, 17 aa, Homo sapiens
ISWVRQAPGQGLEWMGG

SEQ ID NO: 3256 - protein, 17 aa, Homo sapiens
MHWVRQAPGKGLEPVAI

SEQ ID NO: 3257 - protein, 17 aa, Homo sapiens
WNWIRQSPGKGLEWIGY

SEQ ID NO: 3258 - protein, 17 aa, Homo sapiens
MHWVRHRPGKGLEWVSS

SEQ ID NO: 3259 - protein, 17 aa, Homo sapiens
  MOD_RES (1)..(1): Any amino acid
XDWVRQAPGKGLEWVSG

SEQ ID NO: 3260 - protein, 17 aa, Homo sapiens
WTWIRQPAGKGLEWIGR

SEQ ID NO: 3261 - protein, 17 aa, Homo sapiens
MHWVRQAPGKGLEWVAF

SEQ ID NO: 3262 - protein, 17 aa, Homo sapiens
MSWIRQAPGKGPEWISS

SEQ ID NO: 3263 - protein, 17 aa, Homo sapiens
VRQAPGQGLEWMGMINP

SEQ ID NO: 3264 - protein, 17 aa, Homo sapiens
WAWIRQPAGKGLEWVGR

SEQ ID NO: 3265 - protein, 17 aa, Homo sapiens
MNWVRQAPGKGLEWISY

SEQ ID NO: 3266 - protein, 17 aa, Homo sapiens
MHWVRQAPGKGLEWVAF

SEQ ID NO: 3267 - protein, 17 aa, Homo sapiens
MSWVRQAPGKGLEWVST

SEQ ID NO: 3268 - protein, 17 aa, Homo sapiens
MAWVRQAPGKGLEWVSN

SEQ ID NO: 3269 - protein, 17 aa, Homo sapiens
MSWVRQTPGKGLEWVAN

SEQ ID NO: 3270 - protein, 17 aa, Homo sapiens
LSWVRQAPGKGLEWVGF

SEQ ID NO: 3271 - protein, 17 aa, Homo sapiens
WGWVRQPPGKGLEWIAS

SEQ ID NO: 3272 - protein, 17 aa, Homo sapiens
ISWVRQAPGQGLEWMGW

SEQ ID NO: 3273 - protein, 17 aa, Homo sapiens
IVWMRQAPGQGLERMGR

SEQ ID NO: 3274 - protein, 17 aa, Homo sapiens
WNWIRQPPGKGLEWIGY

SEQ ID NO: 3275 - protein, 17 aa, Homo sapiens
WIWVRQPPGKGLEWIGE

SEQ ID NO: 3276 - protein, 17 aa, Homo sapiens
WGWIRQSPGKGLEWIGS

SEQ ID NO: 3277 - protein, 17 aa, Homo sapiens
MSWVRRAPGKGLEWVSV

SEQ ID NO: 3278 - protein, 17 aa, Homo sapiens
MQWVRQTPGKGLEWVAN

SEQ ID NO: 3279 - protein, 17 aa, Homo sapiens
WAWIRQPPGKGLEWIGS

SEQ ID NO: 3280 - protein, 17 aa, Homo sapiens
MSWVRHSPGKGLEWVGR

SEQ ID NO: 3281 - protein, 17 aa, Homo sapiens
INWVRQAPGQGLEWMGG

SEQ ID NO: 3282 - protein, 17 aa, Homo sapiens
INWVRQAPGQGLEWMGG

SEQ ID NO: 3283 - protein, 17 aa, Homo sapiens
MSWVRQAPGKGLEWVSG

SEQ ID NO: 3284 - protein, 17 aa, Homo sapiens
MYWVRQAPGKGLEWVSF

SEQ ID NO: 3285 - protein, 17 aa, Homo sapiens
MTWIRQGPGEGLEWISY

SEQ ID NO: 3286 - protein, 17 aa, Homo sapiens
  MOD_RES (1)..(1): Any amino acid
XNWIRQAPGKGLEWVAR

SEQ ID NO: 3287 - protein, 17 aa, Homo sapiens
IGWVRQAPGQGLEWMGQ

SEQ ID NO: 3288 - protein, 17 aa, Homo sapiens
MHWVRQAPGKGLQWVSS

SEQ ID NO: 3289 - protein, 17 aa, Homo sapiens
MHWVRQAPGQGLEWMGV

SEQ ID NO: 3290 - protein, 17 aa, Homo sapiens
MKWVRQAPGKGLECVAN

SEQ ID NO: 3291 - protein, 17 aa, Homo sapiens
MNWVRQAPGKGLEWVAY

SEQ ID NO: 3292 - protein, 17 aa, Homo sapiens
WSWIRQTPGKGLECIGY

SEQ ID NO: 3293 - protein, 17 aa, Homo sapiens
INWVRQAPGQGLEWMGW

SEQ ID NO: 3294 - protein, 17 aa, Homo sapiens
ISWVRQAPGQGLEWMGG

SEQ ID NO: 3295 - protein, 17 aa, Homo sapiens
INWVRQAPGQGLEWMGG

SEQ ID NO: 3296 - protein, 17 aa, Homo sapiens
MSWVRQAPGRRPEWVAK

SEQ ID NO: 3297 - protein, 17 aa, Homo sapiens
MGWIRQAPGKGPEWLSY

SEQ ID NO: 3298 - protein, 17 aa, Homo sapiens
INWVRQAPGQGLEWMGG

SEQ ID NO: 3299 - protein, 17 aa, Homo sapiens
INWVRQAPGQGLEWMGG

SEQ ID NO: 3300 - protein, 17 aa, Homo sapiens
MTWVRQAPGKGLEWVSA

SEQ ID NO: 3301 - protein, 17 aa, Homo sapiens
MSWVRRAPGKGLEWVST

SEQ ID NO: 3302 - protein, 17 aa, Homo sapiens
MTWVRQAPGKGLEWVAN

SEQ ID NO: 3303 - protein, 17 aa, Homo sapiens
MNWVRQTPGKGLEWVGR

SEQ ID NO: 3304 - protein, 17 aa, Homo sapiens
MTWVRQAPGKGLEGVAN

SEQ ID NO: 3305 - protein, 17 aa, Homo sapiens
WNWIRQSPGKGLEWIGY

SEQ ID NO: 3306 - protein, 17 aa, Homo sapiens
FSWVRQAPGQGLEWMGG

SEQ ID NO: 3307 - protein, 17 aa, Homo sapiens
FGWVRQRPGYGLEWMGT

SEQ ID NO: 3308 - protein, 17 aa, Homo sapiens
IHWVRQAPGQGLEWMGW

SEQ ID NO: 3309 - protein, 7 aa, Homo sapiens
  MOD_RES (3)..(3): Any amino acid
GLXWLGR

SEQ ID NO: 3310 - protein, 17 aa, Homo sapiens
WSWVRQAPGKGLEWIGY

SEQ ID NO: 3311 - protein, 17 aa, Homo sapiens
WGWIRQPPGEGLEWIGT

SEQ ID NO: 3312 - protein, 17 aa, Homo sapiens
MTWVRQAPGKGLEWVAN

SEQ ID NO: 3313 - protein, 17 aa, Homo sapiens
  MOD_RES (1)..(1): Any amino acid
XNWIRQSPSRGLEWLGR

SEQ ID NO: 3314 - protein, 17 aa, Homo sapiens
IRWVRQAPGKGLEWVSS

SEQ ID NO: 3315 - protein, 17 aa, Homo sapiens
MSWVRQSPGMGPEWVSS

SEQ ID NO: 3316 - protein, 17 aa, Homo sapiens
FSWVRQAPGQGLEWMGG

SEQ ID NO: 3317 - protein, 17 aa, Homo sapiens
WDWIRQPPGKGPEWIGS

SEQ ID NO: 3318 - protein, 17 aa, Homo sapiens
ISWVRQAPGQGLEWMGG

SEQ ID NO: 3319 - protein, 17 aa, Homo sapiens
TSWVRQAPGQGLEWMGG

SEQ ID NO: 3320 - protein, 17 aa, Homo sapiens
MNWVRQAPGKGLEWVAG

SEQ ID NO: 3321 - protein, 17 aa, Homo sapiens
MTWVRQAPGKGLEWVGR

SEQ ID NO: 3322 - protein, 17 aa, Homo sapiens
MSWVRQAPGKGLDWVSS

SEQ ID NO: 3323 - protein, 17 aa, Homo sapiens
MTWVRQAPGKGLEWVAN

SEQ ID NO: 3324 - protein, 17 aa, Homo sapiens
MHWVWQTPGKGLEWVSG

SEQ ID NO: 3325 - protein, 17 aa, Homo sapiens
MSWVRQAPGQGLEWMGW

SEQ ID NO: 3326 - protein, 17 aa, Homo sapiens
  MOD_RES (13)..(13): Any amino acid
WGWVRQPPGKGLXWVGS

SEQ ID NO: 3327 - protein, 17 aa, Homo sapiens
FSWVRQAPGKGLEWVAR

SEQ ID NO: 3328 - protein, 17 aa, Homo sapiens
WGWIRQSPGKGLESIGS

SEQ ID NO: 3329 - protein, 17 aa, Homo sapiens
WGGIRQPPGKGLEWIGS

SEQ ID NO: 3330 - protein, 17 aa, Homo sapiens
MHWVRQAPGQGLEWMGW

SEQ ID NO: 3331 - protein, 17 aa, Homo sapiens
WGWIRQPPGKGLEWIGS

SEQ ID NO: 3332 - protein, 17 aa, Homo sapiens
MSWVRQSPGKGLEWVSA

SEQ ID NO: 3333 - protein, 17 aa, Homo sapiens
WGWIRQPPGKGLEWIGS

SEQ ID NO: 3334 - protein, 17 aa, Homo sapiens
MHWVRQAPGKGLEWVAV

SEQ ID NO: 3335 - protein, 17 aa, Homo sapiens
WTWIRQPPGKGLQWIGF

SEQ ID NO: 3336 - protein, 17 aa, Homo sapiens
MSWVRQAPGKGLEWVGF

SEQ ID NO: 3337 - protein, 17 aa, Homo sapiens
WSWIRQHPGKGLEWIGY

SEQ ID NO: 3338 - protein, 17 aa, Homo sapiens
MHWVRQVPGKGLEWVSL

SEQ ID NO: 3339 - protein, 17 aa, Homo sapiens
MHWVRQAPGQGLEWMGW

SEQ ID NO: 3340 - protein, 17 aa, Homo sapiens
WGWIRQPPGKGLEWIGS

SEQ ID NO: 3341 - protein, 17 aa, Homo sapiens
WGWIRQPPGKGLEWIGS

SEQ ID NO: 3342 - protein, 17 aa, Homo sapiens
MHWVRQAPGKGLEWVAV

SEQ ID NO: 3343 - protein, 17 aa, Homo sapiens
MHWVRQAPGQGLQWVAV

SEQ ID NO: 3344 - protein, 17 aa, Homo sapiens
ISWVRQAPGQGLEWMGW

SEQ ID NO: 3345 - protein, 17 aa, Homo sapiens
MSWIRQAPGKGLEWVSY

SEQ ID NO: 3346 - protein, 17 aa, Homo sapiens
WSWIRQHPGKGLEWIGY

SEQ ID NO: 3347 - protein, 17 aa, Homo sapiens
ISWVRQMPGKGLEWMGR

SEQ ID NO: 3348 - protein, 17 aa, Homo sapiens
MHWVRQAPGKGLEWVAV

SEQ ID NO: 3349 - protein, 17 aa, Homo sapiens
MHWVRQAPGKGLEWVSL

SEQ ID NO: 3350 - protein, 17 aa, Homo sapiens
MSWVRQAPGKGLEWVAN

SEQ ID NO: 3351 - protein, 17 aa, Homo sapiens
LTWVRQAPGKGLEWVSV

SEQ ID NO: 3352 - protein, 17 aa, Homo sapiens
MHWVRQAPGQGLEWMGW

SEQ ID NO: 3353 - protein, 17 aa, Homo sapiens
MHWVRQAPGKGLEWVSL

SEQ ID NO: 3354 - protein, 17 aa, Homo sapiens
  MOD_RES (1)..(1): Any amino acid
XSWIRQHPGKGLEWIGY

SEQ ID NO: 3355 - protein, 17 aa, Homo sapiens
WTWIRQPPGKGLEWIGN

SEQ ID NO: 3356 - protein, 17 aa, Homo sapiens
MHWVRQAPGQGLEWMGW

SEQ ID NO: 3357 - protein, 17 aa, Homo sapiens
WGWIRQPPGKGLEWIGN

SEQ ID NO: 3358 - protein, 17 aa, Homo sapiens
MHWVRQATGKGLEWVSA

SEQ ID NO: 3359 - protein, 17 aa, Homo sapiens
MHWVRQAPGKGLEWVSG

SEQ ID NO: 3360 - protein, 17 aa, Homo sapiens
MHWVRQAPGKGLEWVAV

SEQ ID NO: 3361 - protein, 17 aa, Homo sapiens
MSWVRQPPGKGLQWVGH

SEQ ID NO: 3362 - protein, 17 aa, Homo sapiens
WGWIRQPPGKGLEWIGS

SEQ ID NO: 3363 - protein, 17 aa, Homo sapiens
MHWVRQAPGKGLEYVSA

SEQ ID NO: 3364 - protein, 17 aa, Homo sapiens
WGWIRQPPGKGLEWIGS

SEQ ID NO: 3365 - protein, 17 aa, Homo sapiens
WGWIRQPPGKGLEWIGS

SEQ ID NO: 3366 - protein, 17 aa, Homo sapiens
IGWVRQMPGKGLEWMGV

SEQ ID NO: 3367 - protein, 17 aa, Homo sapiens
  MOD_RES (11)..(11): Any amino acid
WGWIRQPPGKXLEWIGS

SEQ ID NO: 3368 - protein, 17 aa, Homo sapiens
WGWIRQPPGKGLEWIGS

SEQ ID NO: 3369 - protein, 17 aa, Homo sapiens
WSWIRQHPGKGLEWIGY

SEQ ID NO: 3370 - protein, 17 aa, Homo sapiens
MHWVRQAPGKGLEWVAV

SEQ ID NO: 3371 - protein, 17 aa, Homo sapiens
  MOD_RES (2)..(2): Any amino acid
MXWIRQAPGKGLEWVSY

SEQ ID NO: 3372 - protein, 17 aa, Homo sapiens
WSWIRQHPGKGLDFIGY

SEQ ID NO: 3373 - protein, 17 aa, Homo sapiens
MSWIRQAPGKGLEWVSY

SEQ ID NO: 3374 - protein, 17 aa, Homo sapiens
MNWVRQAPGKGLEWVSS

SEQ ID NO: 3375 - protein, 17 aa, Homo sapiens
MNWVRQAPGKGLEWVSS

SEQ ID NO: 3376 - protein, 17 aa, Homo sapiens
MSWIRQAPGKGLEWVSY

SEQ ID NO: 3377 - protein, 17 aa, Homo sapiens
MHWVRQAPGKGLEWVSL

SEQ ID NO: 3378 - protein, 17 aa, Homo sapiens
MSWIRQAPGRGLEWVSF

SEQ ID NO: 3379 - protein, 17 aa, Homo sapiens
WGWIRQPPGKGLEWIGS

SEQ ID NO: 3380 - protein, 17 aa, Homo sapiens
MHWVRQAPGKGLEWVAV

SEQ ID NO: 3381 - protein, 17 aa, Homo sapiens
MNWVRQAPGKGLEWVSY

SEQ ID NO: 3382 - protein, 17 aa, Homo sapiens
MNWVRQAPGKGLEWVSS

SEQ ID NO: 3383 - protein, 17 aa, Homo sapiens
MHWVRQAPGQGLEWMGI

SEQ ID NO: 3384 - protein, 17 aa, Homo sapiens
WGWIRQPPGKGLEWIGS

SEQ ID NO: 3385 - protein, 17 aa, Homo sapiens
WSWIRQPPGKGLEWFGF

SEQ ID NO: 3386 - protein, 17 aa, Homo sapiens
WTWIRQPPGKGLEWIGY

SEQ ID NO: 3387 - protein, 17 aa, Homo sapiens
MSWIRQAPGKGLEWVSY

SEQ ID NO: 3388 - protein, 17 aa, Homo sapiens
  MOD_RES (2)..(2): Any amino acid
IXWVRQMPGKGLEWMGR

SEQ ID NO: 3389 - protein, 17 aa, Homo sapiens
WSWIRQSPETGLEWIGY

SEQ ID NO: 3390 - protein, 17 aa, Homo sapiens
MHWVRQAPGQGLEWMGW

SEQ ID NO: 3391 - protein, 17 aa, Homo sapiens
MSWIRQAPGKGLEWVSY

SEQ ID NO: 3392 - protein, 17 aa, Homo sapiens
WGWIRQPPGKGLEWIGN

SEQ ID NO: 3393 - protein, 17 aa, Homo sapiens
MNWVRQAPGKGLEWVSS

SEQ ID NO: 3394 - protein, 17 aa, Homo sapiens
WGWIRQPPGKGLEWIGS

SEQ ID NO: 3395 - protein, 17 aa, Homo sapiens
  MOD_RES (2)..(2): Any amino acid
WXWIRQHPGKGLEWIGY

SEQ ID NO: 3396 - protein, 17 aa, Homo sapiens
WGWIRQPPGKGLEWIGS

SEQ ID NO: 3397 - protein, 17 aa, Homo sapiens
WGWIRQPPGKGLEWIGS

SEQ ID NO: 3398 - protein, 17 aa, Homo sapiens
MHWVRQAPGKGLEWVAV

SEQ ID NO: 3399 - protein, 17 aa, Homo sapiens
MHWVRQAPGKGLEWVAL

SEQ ID NO: 3400 - protein, 17 aa, Homo sapiens
MNWVRQAPGKGLEWVSS

SEQ ID NO: 3401 - protein, 17 aa, Homo sapiens
MSWIRQAPGKGLEWVSY

SEQ ID NO: 3402 - protein, 17 aa, Homo sapiens
MHWVRQAPGQGLEWMGW

SEQ ID NO: 3403 - protein, 8 aa, Homo sapiens
IIGMFGTT

SEQ ID NO: 3404 - protein, 8 aa, Homo sapiens
IIPSFATT

SEQ ID NO: 3405 - protein, 7 aa, Homo sapiens
IYYSGNI

SEQ ID NO: 3406 - protein, 8 aa, Homo sapiens
ISWNSNFL

SEQ ID NO: 3407 - protein, 8 aa, Homo sapiens
ISFDGGRT

SEQ ID NO: 3408 - protein, 8 aa, Homo sapiens
IWFDGSNK

SEQ ID NO: 3409 - protein, 7 aa, Homo sapiens
INQSGST

SEQ ID NO: 3410 - protein, 10 aa, Homo sapiens
IRSKYNDLAT

SEQ ID NO: 3411 - protein, 8 aa, Homo sapiens
MSFYGTTT

SEQ ID NO: 3412 - protein, 8 aa, Homo sapiens
VSADGTYT

SEQ ID NO: 3413 - protein, 7 aa, Homo sapiens
IYYSGNI

SEQ ID NO: 3414 - protein, 8 aa, Homo sapiens
IHPGNSES

SEQ ID NO: 3415 - protein, 8 aa, Homo sapiens
MNQDGSDN

SEQ ID NO: 3416 - protein, 8 aa, Homo sapiens
MWAGGRNR

SEQ ID NO: 3417 - protein, 8 aa, Homo sapiens
MNPNNGDT

SEQ ID NO: 3418 - protein, 8 aa, Homo sapiens
IYPDDSDT

SEQ ID NO: 3419 - protein, 7 aa, Homo sapiens
IYQSGST

SEQ ID NO: 3420 - protein, 8 aa, Homo sapiens
INQDGSDT

SEQ ID NO: 3421 - protein, 7 aa, Homo sapiens
INHSGST

SEQ ID NO: 3422 - protein, 8 aa, Homo sapiens
IKQDGSEK

SEQ ID NO: 3423 - protein, 8 aa, Homo sapiens
INQDGSDT

SEQ ID NO: 3424 - protein, 8 aa, Homo sapiens
VSTSGDRT

SEQ ID NO: 3425 - protein, 8 aa, Homo sapiens
ISGSGNAK

SEQ ID NO: 3426 - protein, 7 aa, Homo sapiens
LYYSGTT

SEQ ID NO: 3427 - protein, 8 aa, Homo sapiens
IKRDGSAK

SEQ ID NO: 3428 - protein, 8 aa, Homo sapiens
IDPSGDSR

SEQ ID NO: 3429 - protein, 8 aa, Homo sapiens
INTYTGNP

SEQ ID NO: 3430 - protein, 8 aa, Homo sapiens
VTDDESYK

SEQ ID NO: 3431 - protein, 8 aa, Homo sapiens
ISGGGHST

SEQ ID NO: 3432 - protein, 7 aa, Homo sapiens
IHYSGST

SEQ ID NO: 3433 - protein, 8 aa, Homo sapiens
IKQDGSEK

SEQ ID NO: 3434 - protein, 7 aa, Homo sapiens
IHYSGST

SEQ ID NO: 3435 - protein, 7 aa, Homo sapiens
ISQSRVT

SEQ ID NO: 3436 - protein, 8 aa, Homo sapiens
LVPVYGTP

SEQ ID NO: 3437 - protein, 8 aa, Homo sapiens
INQDGREK

SEQ ID NO: 3438 - protein, 8 aa, Homo sapiens
LVPIYGTP

SEQ ID NO: 3439 - protein, 8 aa, Homo sapiens
IWFDGGTK

SEQ ID NO: 3440 - protein, 7 aa, Homo sapiens
IYYSGNT

SEQ ID NO: 3441 - protein, 8 aa, Homo sapiens
ISHDGSNE

SEQ ID NO: 3442 - protein, 8 aa, Homo sapiens
INPNSGGT

SEQ ID NO: 3443 - protein, 8 aa, Homo sapiens
ISWNSDTI

SEQ ID NO: 3444 - protein, 8 aa, Homo sapiens
ITGDGSDT

SEQ ID NO: 3445 - protein, 8 aa, Homo sapiens
ISSRGDTI

SEQ ID NO: 3446 - protein, 8 aa, Homo sapiens
ISGSATII

SEQ ID NO: 3447 - protein, 8 aa, Homo sapiens
ISWNSGSR

SEQ ID NO: 3448 - protein, 8 aa, Homo sapiens
ISSDGSNK

SEQ ID NO: 3449 - protein, 8 aa, Homo sapiens
IYPGDSHT

SEQ ID NO: 3450 - protein, 8 aa, Homo sapiens
ISSDGSNK

SEQ ID NO: 3451 - protein, 7 aa, Homo sapiens
IDYTGNT

SEQ ID NO: 3452 - protein, 4 aa, Homo sapiens
GSTI

SEQ ID NO: 3453 - protein, 8 aa, Homo sapiens
VNWNSGDI

SEQ ID NO: 3454 - protein, 8 aa, Homo sapiens
INWKSNNL

SEQ ID NO: 3455 - protein, 8 aa, Homo sapiens
IKSDGRDI

SEQ ID NO: 3456 - protein, 8 aa, Homo sapiens
INWNSGDI

SEQ ID NO: 3457 - protein, 8 aa, Homo sapiens
ITAMFGTA

SEQ ID NO: 3458 - protein, 8 aa, Homo sapiens
IAYDGSNK

SEQ ID NO: 3459 - protein, 7 aa, Homo sapiens
IYFTGKT

SEQ ID NO: 3460 - protein, 8 aa, Homo sapiens
ISWNSDTI

SEQ ID NO: 3461 - protein, 8 aa, Homo sapiens
ISASGGRT

SEQ ID NO: 3462 - protein, 7 aa, Homo sapiens
IYPSGST

SEQ ID NO: 3463 - protein, 8 aa, Homo sapiens
IRYDGSKK

SEQ ID NO: 3464 - protein, 8 aa, Homo sapiens
ISSSSTTK

SEQ ID NO: 3465 - protein, 8 aa, Homo sapiens
RNPRGGST

SEQ ID NO: 3466 - protein, 7 aa, Homo sapiens
IFITGST

SEQ ID NO: 3467 - protein, 8 aa, Homo sapiens
ISGSGNII

SEQ ID NO: 3468 - protein, 8 aa, Homo sapiens
VRYDGSNI

SEQ ID NO: 3469 - protein, 7 aa, Homo sapiens
ITGNGRT

SEQ ID NO: 3470 - protein, 8 aa, Homo sapiens
IVGSGDST

SEQ ID NO: 3471 - protein, 8 aa, Homo sapiens
IDEDGRDK

SEQ ID NO: 3472 - protein, 10 aa, Homo sapiens
IRSKAYGGTT

SEQ ID NO: 3473 - protein, 7 aa, Homo sapiens
IYHSGST

SEQ ID NO: 3474 - protein, 8 aa, Homo sapiens
ISTKNVNT

SEQ ID NO: 3475 - protein, 8 aa, Homo sapiens
INPQSGGT

SEQ ID NO: 3476 - protein, 7 aa, Homo sapiens
IYHTGST

SEQ ID NO: 3477 - protein, 7 aa, Homo sapiens
IWHSGRT

SEQ ID NO: 3478 - protein, 7 aa, Homo sapiens
INSGGRT

SEQ ID NO: 3479 - protein, 7 aa, Homo sapiens
IYSGGGT

SEQ ID NO: 3480 - protein, 8 aa, Homo sapiens
IHPGGNER

SEQ ID NO: 3481 - protein, 7 aa, Homo sapiens
IYHSVNT

SEQ ID NO: 3482 - protein, 10 aa, Homo sapiens
VKSQSDGGAA

SEQ ID NO: 3483 - protein, 8 aa, Homo sapiens
ISPIFGAV

SEQ ID NO: 3484 - protein, 8 aa, Homo sapiens
ISPIFGGV

SEQ ID NO: 3485 - protein, 8 aa, Homo sapiens
ISGSGDDT

SEQ ID NO: 3486 - protein, 8 aa, Homo sapiens
ISSRSDAI

SEQ ID NO: 3487 - protein, 8 aa, Homo sapiens
MNSGGSVI

SEQ ID NO: 3488 - protein, 10 aa, Homo sapiens
IKRKIEGEAT

SEQ ID NO: 3489 - protein, 8 aa, Homo sapiens
SIPLLGTT

SEQ ID NO: 3490 - protein, 8 aa, Homo sapiens
ITSSSNDI

SEQ ID NO: 3491 - protein, 8 aa, Homo sapiens
IDPSGGGT

SEQ ID NO: 3492 - protein, 8 aa, Homo sapiens
IEPDGSQR

SEQ ID NO: 3493 - protein, 8 aa, Homo sapiens
IFASGSTL

SEQ ID NO: 3494 - protein, 7 aa, Homo sapiens
ISDSGRT

SEQ ID NO: 3495 - protein, 8 aa, Homo sapiens
ISSYNGNK

SEQ ID NO: 3496 - protein, 8 aa, Homo sapiens
ITAIFGTT

SEQ ID NO: 3497 - protein, 8 aa, Homo sapiens
ISPIFGAV

SEQ ID NO: 3498 - protein, 8 aa, Homo sapiens
IKHDGSEK

SEQ ID NO: 3499 - protein, 8 aa, Homo sapiens
ISSSGYTI

SEQ ID NO: 3500 - protein, 8 aa, Homo sapiens
ISGSGTYI

SEQ ID NO: 3501 - protein, 8 aa, Homo sapiens
ISPIFGAG

SEQ ID NO: 3502 - protein, 8 aa, Homo sapiens
ISPIFGAV

SEQ ID NO: 3503 - protein, 8 aa, Homo sapiens
ISGSGGST

SEQ ID NO: 3504 - protein, 8 aa, Homo sapiens
ISGIGDTT

SEQ ID NO: 3505 - protein, 8 aa, Homo sapiens
INQDGSEK

SEQ ID NO: 3506 - protein, 10 aa, Homo sapiens
IWSKSDGLTT

SEQ ID NO: 3507 - protein, 8 aa, Homo sapiens
IKQDGSET

SEQ ID NO: 3508 - protein, 7 aa, Homo sapiens
VYYAGGT

SEQ ID NO: 3509 - protein, 8 aa, Homo sapiens
IIPIFGTT

SEQ ID NO: 3510 - protein, 8 aa, Homo sapiens
IYPGDSST

SEQ ID NO: 3511 - protein, 8 aa, Homo sapiens
INPNSGGA

SEQ ID NO: 3512 - protein, 9 aa, Homo sapiens
  MOD_RES (1)..(1): Any amino acid
  MOD_RES (3)..(3): Any amino acid
  MOD_RES (6)..(7): Any amino acid
XYXLAXXYT

SEQ ID NO: 3513 - protein, 7 aa, Homo sapiens
VYSHGRT

SEQ ID NO: 3514 - protein, 7 aa, Homo sapiens
INYGGTA

SEQ ID NO: 3515 - protein, 8 aa, Homo sapiens
INQDGSEK

SEQ ID NO: 3516 - protein, 9 aa, Homo sapiens
  MOD_RES (7)..(7): Any amino acid
TYYRSKXYN

SEQ ID NO: 3517 - protein, 8 aa, Homo sapiens
ISATGATI

SEQ ID NO: 3518 - protein, 8 aa, Homo sapiens
ISRDGILT

SEQ ID NO: 3519 - protein, 8 aa, Homo sapiens
IVPILGTT

SEQ ID NO: 3520 - protein, 7 aa, Homo sapiens
FYYRGTP

SEQ ID NO: 3521 - protein, 8 aa, Homo sapiens
VLPMFNVP

SEQ ID NO: 3522 - protein, 8 aa, Homo sapiens
IIPILDKT

SEQ ID NO: 3523 - protein, 8 aa, Homo sapiens
ISYDGGNE

SEQ ID NO: 3524 - protein, 10 aa, Homo sapiens
IKSDRDGGTA

SEQ ID NO: 3525 - protein, 8 aa, Homo sapiens
ISTSGSII

SEQ ID NO: 3526 - protein, 8 aa, Homo sapiens
INQDGSEK

SEQ ID NO: 3527 - protein, 8 aa, Homo sapiens
LSGDSGTI

SEQ ID NO: 3528 - protein, 8 aa, Homo sapiens
ILPASGDT

SEQ ID NO: 3529 - protein, 7 aa, Homo sapiens
  MOD_RES (2)..(2): Any amino acid
  MOD_RES (4)..(4): Any amino acid
VXYXGIA

SEQ ID NO: 3530 - protein, 10 aa, Homo sapiens
IKRQSSGGTT

SEQ ID NO: 3531 - protein, 7 aa, Homo sapiens
MSYSGTP

SEQ ID NO: 3532 - protein, 7 aa, Homo sapiens
IYYSGST

SEQ ID NO: 3533 - protein, 8 aa, Homo sapiens
INPNSGGT

SEQ ID NO: 3534 - protein, 7 aa, Homo sapiens
IYYSGST

SEQ ID NO: 3535 - protein, 8 aa, Homo sapiens
ISGPGRGT

SEQ ID NO: 3536 - protein, 7 aa, Homo sapiens
IYYSGST

SEQ ID NO: 3537 - protein, 8 aa, Homo sapiens
ISYDGSNK

SEQ ID NO: 3538 - protein, 7 aa, Homo sapiens
IYDSGST

SEQ ID NO: 3539 - protein, 10 aa, Homo sapiens
IRAKPYGGTT

SEQ ID NO: 3540 - protein, 7 aa, Homo sapiens
IYYSGST

SEQ ID NO: 3541 - protein, 8 aa, Homo sapiens
ISGDGGST

SEQ ID NO: 3542 - protein, 8 aa, Homo sapiens
INPNTGGT

SEQ ID NO: 3543 - protein, 7 aa, Homo sapiens
IYYSGNT

SEQ ID NO: 3544 - protein, 7 aa, Homo sapiens
MYYSGNT

SEQ ID NO: 3545 - protein, 8 aa, Homo sapiens
IWYDGSNK

SEQ ID NO: 3546 - protein, 8 aa, Homo sapiens
TSFVGTMK

SEQ ID NO: 3547 - protein, 8 aa, Homo sapiens
ISAYNGNT

SEQ ID NO: 3548 - protein, 8 aa, Homo sapiens
ISSSGSTI

SEQ ID NO: 3549 - protein, 7 aa, Homo sapiens
IYYSGST

SEQ ID NO: 3550 - protein, 8 aa, Homo sapiens
IDPSDSYT

SEQ ID NO: 3551 - protein, 8 aa, Homo sapiens
ISYDGSNK

SEQ ID NO: 3552 - protein, 8 aa, Homo sapiens
ISGDGGST

SEQ ID NO: 3553 - protein, 8 aa, Homo sapiens
IKQDGSEK

SEQ ID NO: 3554 - protein, 7 aa, Homo sapiens
IYSGDST

SEQ ID NO: 3555 - protein, 8 aa, Homo sapiens
INPNSGGT

SEQ ID NO: 3556 - protein, 8 aa, Homo sapiens
ISGDGGST

SEQ ID NO: 3557 - protein, 7 aa, Homo sapiens
IYYSGST

SEQ ID NO: 3558 - protein, 7 aa, Homo sapiens
EYYSGST

SEQ ID NO: 3559 - protein, 8 aa, Homo sapiens
INPNSGGT

SEQ ID NO: 3560 - protein, 7 aa, Homo sapiens
IYYSGNT

SEQ ID NO: 3561 - protein, 7 aa, Homo sapiens
IGTAGDT

SEQ ID NO: 3562 - protein, 8 aa, Homo sapiens
ISWNSGSI

SEQ ID NO: 3563 - protein, 8 aa, Homo sapiens
ISYDGSNK

SEQ ID NO: 3564 - protein, 10 aa, Homo sapiens
FKIKADGGTT

SEQ ID NO: 3565 - protein, 7 aa, Homo sapiens
IYYSGNT

SEQ ID NO: 3566 - protein, 8 aa, Homo sapiens
ISSNGGST

SEQ ID NO: 3567 - protein, 7 aa, Homo sapiens
IYYSGST

SEQ ID NO: 3568 - protein, 7 aa, Homo sapiens
IYYSGRT

SEQ ID NO: 3569 - protein, 8 aa, Homo sapiens
IYPSDSDT

SEQ ID NO: 3570 - protein, 7 aa, Homo sapiens
IYYSGNT

SEQ ID NO: 3571 - protein, 7 aa, Homo sapiens
IYYSGST

SEQ ID NO: 3572 - protein, 7 aa, Homo sapiens
IHYSGST

SEQ ID NO: 3573 - protein, 8 aa, Homo sapiens
  MOD_RES (3)..(3): Any amino acid
IWXDGSNK

SEQ ID NO: 3574 - protein, 8 aa, Homo sapiens
ISSSGSTI

SEQ ID NO: 3575 - protein, 7 aa, Homo sapiens
IYYTGST

SEQ ID NO: 3576 - protein, 8 aa, Homo sapiens
ISSSSSYT

SEQ ID NO: 3577 - protein, 8 aa, Homo sapiens
ISSSSSYI

SEQ ID NO: 3578 - protein, 8 aa, Homo sapiens
ISSSSSYI

SEQ ID NO: 3579 - protein, 8 aa, Homo sapiens
ISSSSSYT

SEQ ID NO: 3580 - protein, 8 aa, Homo sapiens
ISGDGGST

SEQ ID NO: 3581 - protein, 8 aa, Homo sapiens
ISSIGRTV

SEQ ID NO: 3582 - protein, 7 aa, Homo sapiens
IYYSGNT

SEQ ID NO: 3583 - protein, 8 aa, Homo sapiens
IWYDGSNK

SEQ ID NO: 3584 - protein, 8 aa, Homo sapiens
ISGSGGTI

SEQ ID NO: 3585 - protein, 8 aa, Homo sapiens
ISSSGSYI

SEQ ID NO: 3586 - protein, 8 aa, Homo sapiens
INPSGGST

SEQ ID NO: 3587 - protein, 7 aa, Homo sapiens
IYYSGNT

SEQ ID NO: 3588 - protein, 7 aa, Homo sapiens
IYYSGST

SEQ ID NO: 3589 - protein, 7 aa, Homo sapiens
FYDSGSL

SEQ ID NO: 3590 - protein, 8 aa, Homo sapiens
ISSSSSYT

SEQ ID NO: 3591 - protein, 8 aa, Homo sapiens
IDPTDSYT

SEQ ID NO: 3592 - protein, 7 aa, Homo sapiens
ILYTGST

SEQ ID NO: 3593 - protein, 8 aa, Homo sapiens
INPNSGGT

SEQ ID NO: 3594 - protein, 8 aa, Homo sapiens
ISSSSSYT

SEQ ID NO: 3595 - protein, 7 aa, Homo sapiens
IYYSGST

SEQ ID NO: 3596 - protein, 8 aa, Homo sapiens
ISSSSSYI

SEQ ID NO: 3597 - protein, 7 aa, Homo sapiens
IYYSGST

SEQ ID NO: 3598 - protein, 7 aa, Homo sapiens
IYYSGST

SEQ ID NO: 3599 - protein, 7 aa, Homo sapiens
IYYSGST

SEQ ID NO: 3600 - protein, 7 aa, Homo sapiens
IYYSGNT

SEQ ID NO: 3601 - protein, 8 aa, Homo sapiens
ISYDGSNK

SEQ ID NO: 3602 - protein, 8 aa, Homo sapiens
ICFDGKNK

SEQ ID NO: 3603 - protein, 8 aa, Homo sapiens
ISSSSSYI

SEQ ID NO: 3604 - protein, 8 aa, Homo sapiens
ISSSSSYT

SEQ ID NO: 3605 - protein, 8 aa, Homo sapiens
INPNSGGT

SEQ ID NO: 3606 - protein, 38 aa, Homo sapiens
NYAQKFQGRVTITADEISSTAYMELSSLRSEDTAVYYC

SEQ ID NO: 3607 - protein, 38 aa, Homo sapiens
KYAQKFRERVIITADESTTTAYMELGGLTSDDTAVYHC

SEQ ID NO: 3608 - protein, 38 aa, Homo sapiens
YYNPSLKSRVTLSIDTSKSQVSLRLSSVTAADTAMYYC

SEQ ID NO: 3609 - protein, 38 aa, Homo sapiens
  MOD_RES (10)..(10): Any amino acid
DYADSVKGRXTISRDDAKNSLYLEMNSLRLEDTAFYYC

SEQ ID NO: 3610 - protein, 38 aa, Homo sapiens
FSADSVKGRFTISRDNSKNTVFLHMNSLRPADTAVYFC

SEQ ID NO: 3611 - protein, 38 aa, Homo sapiens
YYTDSVKGRFIISRDHSKNTLYLQMNSLRAEDTAVYHC

SEQ ID NO: 3612 - protein, 38 aa, Homo sapiens
  MOD_RES (5)..(5): Any amino acid
TYNPXLKSRVTLSVDTSKNQFSLRLTSVTAADTAVYYC

SEQ ID NO: 3613 - protein, 38 aa, Homo sapiens
AYTESVKGRFTISRDDSKNTAYLQMNSLRIEDSAVYYC

SEQ ID NO: 3614 - protein, 38 aa, Homo sapiens
YEADSVKGRFTISRDNSKNTLYLQMNSLRPEDTAVYFC

SEQ ID NO: 3615 - protein, 38 aa, Homo sapiens
NYGDSMKGRVTVSRDNLKKTMYLQINSLRPEDTAMYYC

SEQ ID NO: 3616 - protein, 38 aa, Homo sapiens
NYNPSLKSRVTLSVDTSKSQFSLKLNSVTAADTAMYYC

SEQ ID NO: 3617 - protein, 38 aa, Homo sapiens
RYSPSFQGQVTMSADKSINTAYLEWSSLKASDTAMYYC

SEQ ID NO: 3618 - protein, 38 aa, Homo sapiens
YYVDSVKGRFTISRDNAKNSLYLQMNSLRAEDTAVYYC

SEQ ID NO: 3619 - protein, 38 aa, Homo sapiens
FYADSVKGRFTISRDDSKNTLSLQMHSLRAEDTGVYYC

SEQ ID NO: 3620 - protein, 38 aa, Homo sapiens
GYAEKFRGRVSMTRDTSRNTAFMELRGLTSEDTAIYYC

SEQ ID NO: 3621 - protein, 38 aa, Homo sapiens
KYSPTFQGQVTISADKSISTAYLQWSSLKASDTAMYYC

SEQ ID NO: 3622 - protein, 38 aa, Homo sapiens
YYSPSLKSRVNISLDKSNNRFFLNVMSVTAADTAVYYC

SEQ ID NO: 3623 - protein, 38 aa, Homo sapiens
TFLGPVKGRFTISRDNTKNSVFLQMNVLRDEDSAIYYC

SEQ ID NO: 3624 - protein, 38 aa, Homo sapiens
NYNPSLKSRVTISVDTSKNQFSLKLSSVTAADTAVYYC

SEQ ID NO: 3625 - protein, 38 aa, Homo sapiens
YYVDSVKGRFTMSRDNANNSLYLQMSNLRAEDTAIYYC

SEQ ID NO: 3626 - protein, 38 aa, Homo sapiens
TFLGSVEGRFTISRDNARNSVFLQMSVLRVEDTATYYC

SEQ ID NO: 3627 - protein, 38 aa, Homo sapiens
VYADSVKGRFTISRDNSKNTLYLQMNSLRVEDTALYYC

SEQ ID NO: 3628 - protein, 38 aa, Homo sapiens
YHADSVRGRFTISRDNAKDSLFLQMNNLRVDDTAVYYC

SEQ ID NO: 3629 - protein, 38 aa, Homo sapiens
SYNPSLKSRVTMSADTSKRQLSLRLTSVTSADTAVYYC

SEQ ID NO: 3630 - protein, 38 aa, Homo sapiens
YYVDSAKGRFTISRDNTKNSVDLHMRSLTVEDTALYYC

SEQ ID NO: 3631 - protein, 38 aa, Homo sapiens
SYSQKFQGRVTLTSDTSTSTVYMELRTLRSDDTAVFYC

SEQ ID NO: 3632 - protein, 38 aa, Homo sapiens
TYAQAFTGRFVFSLDTSVSTAFLQITSLKADDTAIYYC

SEQ ID NO: 3633 - protein, 38 aa, Homo sapiens
SYANSVKGRYTISRDNSRNTVYLHMDSLRPEDTAIYYC

SEQ ID NO: 3634 - protein, 38 aa, Homo sapiens
YYADSVKGRFSISRDNSKNTLYLQLNSLRAEDTAIFYC

SEQ ID NO: 3635 - protein, 38 aa, Homo sapiens
SYSPSLKSRITMSVDTSKSQFSLKLNSVTAADTAVYYC

SEQ ID NO: 3636 - protein, 38 aa, Homo sapiens
YYVDSVKGRFTISRDNAKNSLYLQMNSLRVEDTAVFYC

SEQ ID NO: 3637 - protein, 38 aa, Homo sapiens
FYNPSLKSRVTISLNAAKNHFSLRLSSVTAADTAVYYC

SEQ ID NO: 3638 - protein, 38 aa, Homo sapiens
TYNPSLGGRVYFSVDTSKNQFSLNLNSVTAADTAVYYC

SEQ ID NO: 3639 - protein, 38 aa, Homo sapiens
NYAQAFQDRITISADESTNTAYLELSSLTSEDTAVYYC

SEQ ID NO: 3640 - protein, 38 aa, Homo sapiens
HYVDSVRGRFTISRDNAKNSLYLQMNSLRVEDTALYYC

SEQ ID NO: 3641 - protein, 38 aa, Homo sapiens
NYAQAFHDRITITADESTSTAYLEMTSLTSEDTAVYYC

SEQ ID NO: 3642 - protein, 38 aa, Homo sapiens; identical to SEQ ID NO: 631

SEQ ID NO: 3643 - protein, 38 aa, Homo sapiens
YYNPSLRSRASISVDTSKNEFFLSLTSVTAADTAVYYC

SEQ ID NO: 3644 - protein, 38 aa, Homo sapiens
DYADSVKGRFTISRDNSKNNLYLQMNRLRAEDTAVYYC

SEQ ID NO: 3645 - protein, 38 aa, Homo sapiens
NYAQRFQGRVTMTRDTSFSTVYMEVNRLRSDDTAVYYC

SEQ ID NO: 3646 - protein, 38 aa, Homo sapiens
YYADSVKGRFTISRDNTKNSLYLQMTSLTSEDTALYFC

SEQ ID NO: 3647 - protein, 38 aa, Homo sapiens
FYSDSVKGRFTISRDNNKNSLYLQMYSLSSEDTALYFC

SEQ ID NO: 3648 - protein, 38 aa, Homo sapiens
  MOD_RES (1)..(1): Any amino acid
  MOD_RES (3)..(3): Any amino acid
  MOD_RES (12)..(12): Any amino acid
  MOD_RES (14)..(14): Any amino acid
  MOD_RES (17)..(19): Any amino acid
  MOD_RES (21)..(21): Any amino acid
  MOD_RES (27)..(27): Any amino acid
  MOD_RES (31)..(31): Any amino acid
  MOD_RES (33)..(34): Any amino acid
XYXDSVKGRFTXSXDNXXXSXYLQMNXLQAXDXXVYYC

SEQ ID NO: 3649 - protein, 38 aa, Homo sapiens
YYADSVKGRFTISRDNPRNSLYLQMNSLRAEDTAVYYC

SEQ ID NO: 3650 - protein, 38 aa, Homo sapiens
VYADSVKGRFTISRDNAKTSLYLQMNSLRPEDTALYYC

SEQ ID NO: 3651 - protein, 38 aa, Homo sapiens
YYADSVKGRFVISRDNSENTLYLQMDSLRPEDTAVYYC

SEQ ID NO: 3652 - protein, 38 aa, Homo sapiens
RYSPSFQGQVTLSADTSTNTAYLHWFSLKASDTAIYYC

SEQ ID NO: 3653 - protein, 38 aa, Homo sapiens
YYADSVKGRFTISRDNSKNTLYLQMNSLRSEDTAVYSC

SEQ ID NO: 3654 - protein, 38 aa, Homo sapiens
YYNPSLKSRVTISEDTSKNQFSLKMTSVTAADTAVYYC

SEQ ID NO: 3655 - protein, 38 aa, Homo sapiens
YYADSVKGRFTISRDNAKKSVYLEMNSLRAEDTAVYYC

SEQ ID NO: 3656 - protein, 38 aa, Homo sapiens
GYADSVKGRFTISRDNAKKSLFLQMNSLRPEDTAFYYC

SEQ ID NO: 3657 - protein, 38 aa, Homo sapiens
GYADSVKGRFTISRDSAKKSLYLQMNSLRSEDTATYYC

SEQ ID NO: 3658 - protein, 38 aa, Homo sapiens
SYADSVKGRFTVSRDNAKNTVYLQMNSLRAEDTAVYYC

SEQ ID NO: 3659 - protein, 38 aa, Homo sapiens
GYADSVEGRFTISRDNAKNSLFLQMNSLRTEDTALYYC

SEQ ID NO: 3660 - protein, 38 aa, Homo sapiens
FYAQRFQDRLTITADKPTDKFMSTVSMELRSLTSEDTA

SEQ ID NO: 3661 - protein, 38 aa, Homo sapiens
YYADSVRGRFTVSRDNSKNTLYLQMNSLRTEDTAVYYC

SEQ ID NO: 3662 - protein, 38 aa, Homo sapiens
  MOD_RES (20)..(20): Any amino acid
NYNPSLKSRVTISVDPSKTXFSLKLTSVTAADTAVYYC

SEQ ID NO: 3663 - protein, 38 aa, Homo sapiens
HYADSVKGRFTISRDNAKNSVYLQMSRLTSEDTALYFC

SEQ ID NO: 3664 - protein, 38 aa, Homo sapiens
YYADSVKGRFTISRDNSRDTFFLQMNSLRNDDTAIYYC

SEQ ID NO: 3665 - protein, 38 aa, Homo sapiens
NYNPSLKSRVTISVDTSKNHFSLNLSSVTAADTAVYYC

SEQ ID NO: 3666 - protein, 38 aa, Homo sapiens
YYADSVKGRFTISRDNSKSSLYLQMNSLRTDDTAVYYC

SEQ ID NO: 3667 - protein, 38 aa, Homo sapiens
SYADSVKGRFTISRDNAQNSLFLHMNSLRADDAAVYFC

SEQ ID NO: 3668 - protein, 38 aa, Homo sapiens
SYAQNLQGRVTLTSDTSTSTVYLELSSLKSEDTAVYHC

SEQ ID NO: 3669 - protein, 38 aa, Homo sapiens
DYNPSLKSRVTISLDTSKNQFSLKLTSVTAADTAVYFC

SEQ ID NO: 3670 - protein, 38 aa, Homo sapiens
YYADSVKGRFTISRDNAKNSLYLQMNSVRDDDTALYYC

SEQ ID NO: 3671 - protein, 38 aa, Homo sapiens
CYAASVKGRFTISRDNSKNTVYLQMNSLRADDTAVYYC

SEQ ID NO: 3672 - protein, 38 aa, Homo sapiens
FYADSVKGHFTISRDNSKNMLYLQMNSLRAEDTAVYYC

SEQ ID NO: 3673 - protein, 38 aa, Homo sapiens
YYADSVKGRFSISRDNSNNTLTLQMHSLRAEDTAIYYC

SEQ ID NO: 3674 - protein, 38 aa, Homo sapiens
YYVDSVKGRFSISRDNAKNSLHLQMSNLRAEDTAVYYC

SEQ ID NO: 3675 - protein, 38 aa, Homo sapiens
EYAASVKGRFTISRDDSKSIAYLQMNSLKTEDTAVYYC

SEQ ID NO: 3676 - protein, 38 aa, Homo sapiens
YYNMSLKSRVTISVDTSKNQFSLKLTSVTAADTAVYYC

SEQ ID NO: 3677 - protein, 38 aa, Homo sapiens
NYAQKLQGRVTMTADTSTSTAYMDLRTLRSDDTAVYFC

SEQ ID NO: 3678 - protein, 38 aa, Homo sapiens
DVPQKFQGTVTLTRDTSISTAYMELSSLRSDDTALYFC

SEQ ID NO: 3679 - protein, 38 aa, Homo sapiens
NSNPSLKSRVTISVDTSKNQFSLKLSSVTAADTAVYYC

SEQ ID NO: 3680 - protein, 38 aa, Homo sapiens
NYNSSLKSRLSISVDIFKHQFSLNLNSLTAADTAVYYC

SEQ ID NO: 3681 - protein, 38 aa, Homo sapiens
TYGPSLDGRVTMSVDTSNNQLSLKLRSVTAADTAVYYC

SEQ ID NO: 3682 - protein, 38 aa, Homo sapiens; identical to SEQ ID NO: 632

SEQ ID NO: 3683 - protein, 38 aa, Homo sapiens
YYGDSVKGRFTISRDTSRNSLSLQMNSLSVEDTGIYYC

SEQ ID NO: 3684 - protein, 38 aa, Homo sapiens
YHVDSVRGRFTISRDNAKNSLYLQMNSLRAEDTAIYYC

SEQ ID NO: 3685 - protein, 38 aa, Homo sapiens
YYNPSLKSRVTVSVDTSKNQLSLRLTSVTAADTAMYYC

SEQ ID NO: 3686 - protein, 38 aa, Homo sapiens
DYGAAVKGRFTISRDDSKNTVFLQMNSLRTEDTGVYYC

SEQ ID NO: 3687 - protein, 38 aa, Homo sapiens
HHAQKFQGRVTITADIFTSTAYMELSSLGSEDTAIYYC

SEQ ID NO: 3688 - protein, 38 aa, Homo sapiens
KHAQKFQGRVTITADIFARTVYMDLSNLGSDDTAIYFC

SEQ ID NO: 3689 - protein, 38 aa, Homo sapiens
YYADSVKGRFTISRDNSKNTVYLEMSSLRAEDTAVYFC

SEQ ID NO: 3690 - protein, 38 aa, Homo sapiens
YYAGSVQGRFTISRNNAANTLYLQMNSLRVEDTALYYC

SEQ ID NO: 3691 - protein, 38 aa, Homo sapiens
RYADSVKGRFTIYRDNAKKSVHLEMNSLRPDDTAVYYC

SEQ ID NO: 3692 - protein, 38 aa, Homo sapiens
DYAAPVKGRFTISRDDSRYTVHLQMDSLKSEDTAVYYC

SEQ ID NO: 3693 - protein, 38 aa, Homo sapiens
KYAHKFQGRVTITAEDSGSTTYLDLSRLNFDDTAVYYC

SEQ ID NO: 3694 - protein, 38 aa, Homo sapiens
YYADSVKGRFTISRDNAKNSLFLQMNSLRTDDTAVYYC

SEQ ID NO: 3695 - protein, 38 aa, Homo sapiens
TYAQKFQGRVTMTRDTSTSTVNMQLTSLRSEDTAVYYC

SEQ ID NO: 3696 - protein, 38 aa, Homo sapiens
WHVDSVKGRFTISRDNAKNSLYLQMNSLRGEDTAMYYC

SEQ ID NO: 3697 - protein, 38 aa, Homo sapiens
FYADSVKGRFTISRDNAKNSLYLQMNSLRGEDTAVYYC

SEQ ID NO: 3698 - protein, 38 aa, Homo sapiens
NYNPSLKSRVTISIDTSKNQFSLKLRSVTAADTAVYFC

SEQ ID NO: 3699 - protein, 38 aa, Homo sapiens
HYVQKFQGRVTMTTDTSTNTAYMELRSLRSDDTAVYYC

SEQ ID NO: 3700 - protein, 38 aa, Homo sapiens
NYAQKFQGRLTITADESTSSTYMELSSLRSEDTAVYYC

SEQ ID NO: 3701 - protein, 38 aa, Homo sapiens
KHGQEFQGRVTFTADVFTSTVYMELSSLGSEDTAIYYC

SEQ ID NO: 3702 - protein, 38 aa, Homo sapiens
YYVGSVQGRFIISKDNAKNFLYLQMDRLRADDTAVYYC

SEQ ID NO: 3703 - protein, 38 aa, Homo sapiens
FYADSVKGRFTISRDNSKNSLYLQMNSLTAEDTAVYYC

SEQ ID NO: 3704 - protein, 38 aa, Homo sapiens
YYADSVRGRFTISRDNAKTSLYLQMNSLRAEDTAVYYC

SEQ ID NO: 3705 - protein, 38 aa, Homo sapiens
KHAQKLQGRVTITADVFTSTVYMELGSLRSEDTATYYC

SEQ ID NO: 3706 - protein, 38 aa, Homo sapiens
KHAQKFQGRLTITADVFVKTAYMELSSLGFEDTAIYYC

SEQ ID NO: 3707 - protein, 38 aa, Homo sapiens
WYADSVKGRFTISRDNSQSTLFLQMHGLRADDTAIYYC

SEQ ID NO: 3708 - protein, 38 aa, Homo sapiens
YYADSVKGRFTISRDNSKKSLYVQLDSLRAEDTAVYYC

SEQ ID NO: 3709 - protein, 38 aa, Homo sapiens
DYVDSVKGRFTISRDNAQNSLFLQMDSLRVEDTALYYC

SEQ ID NO: 3710 - protein, 38 aa, Homo sapiens
QYAAPVQGRFTISRDDSKNTLYLQMNSLKTEDTAVYYC

SEQ ID NO: 3711 - protein, 38 aa, Homo sapiens
YYVDSVKGRFTISRDNAQNSLYLQMNSLRAEDTAVYFC

SEQ ID NO: 3712 - protein, 38 aa, Homo sapiens
RYNPSLKSRVTITEDTSKNQFSLKLRSVTAADTAVYYC

SEQ ID NO: 3713 - protein, 38 aa, Homo sapiens
NYAQRFQGRVTITADESTSTAYMELSSLRSEDTAVYYC

SEQ ID NO: 3714 - protein, 38 aa, Homo sapiens
RYNPSFQGQISISADDSTTTAYLQWPSLKASDSGTYYC

SEQ ID NO: 3715 - protein, 38 aa, Homo sapiens
NSAQKFQGRVTMTRDTSITTAYMDLTRLTSDDTAVYYC

SEQ ID NO: 3716 - protein, 38 aa, Homo sapiens
  MOD_RES (5)..(5): Any amino acid
  MOD_RES (11)..(11): Any amino acid
  MOD_RES (18)..(21): Any amino acid
  MOD_RES (24)..(24): Any amino acid
DSAVXVKGRIXVNADPSXXXXSLXLNSVTPEDTAVYYC

SEQ ID NO: 3717 - protein, 38 aa, Homo sapiens
NYNPSLKGRVTVSADPSTNTFSLNLMSMTAADKAVYYC

SEQ ID NO: 3718 - protein, 38 aa, Homo sapiens
YYNPSLKSRVAISVDTSKSQVSLRLSSVTAADTAVYYC

SEQ ID NO: 3719 - protein, 38 aa, Homo sapiens
  MOD_RES (18)..(18): Any amino acid
DFVDSVKGRFTISRDNAXSSLFLQMNSLRAEDTAVYYC

SEQ ID NO: 3720 - protein, 38 aa, Homo sapiens
  MOD_RES (12)..(12): Any amino acid
DYAVSVKSRIAXNPETSKNQFSLQLNSVTPEDTAVYYC

SEQ ID NO: 3721 - protein, 38 aa, Homo sapiens
YYADSVKGRFTISRDNSKNTVYLQVNSLRAEDTAVYYC

SEQ ID NO: 3722 - protein, 38 aa, Homo sapiens
YYKDSVKGRFTLSRDNSKNTLYLEMNSLTTDDTAVYYC

SEQ ID NO: 3723 - protein, 38 aa, Homo sapiens
DYAQRFQGRVSITADKATTTAYMDLSSLRSEDTAVYYC

SEQ ID NO: 3724 - protein, 38 aa, Homo sapiens
YNNPSLKSRVTISLDTSKNQFSLKLTSVTAADTAVYYC

SEQ ID NO: 3725 - protein, 38 aa, Homo sapiens
KYAQKFQGRVTITADKSTNTAYLELSRLRSEDTAVYYC

SEQ ID NO: 3726 - protein, 38 aa, Homo sapiens
YYADSVKGRFTISRDNSKNTVYLQIISLRVEDTAVYYC

SEQ ID NO: 3727 - protein, 38 aa, Homo sapiens
NYAQKFQGRVTITADRSTSTAYMELSSLRSEDTGMYYC

SEQ ID NO: 3728 - protein, 38 aa, Homo sapiens
YYVDSVKGRFTISRDNAKNTLHLQMNSLRAEDTAVYYC

SEQ ID NO: 3729 - protein, 38 aa, Homo sapiens
DYAAPVKGRFTISKDDSKKTVYLQMDSLKTEDTAIYYC

SEQ ID NO: 3730 - protein, 38 aa, Homo sapiens
NYADSVKGRFIISRDNSKSSLFLDMSDLRVEDSALYYC

SEQ ID NO: 3731 - protein, 38 aa, Homo sapiens
DYVDSVKGRFTISRDNAKNSLYLQMNSLRAEDTAVYYC

SEQ ID NO: 3732 - protein, 38 aa, Homo sapiens
GYADSVKGRFTISRDNAKDSLYLQMNSLRTEDTALYYC

SEQ ID NO: 3733 - protein, 38 aa, Homo sapiens
KYSQRFQGRVTMTTDTSISTAYMDLKSLTGDDTAVYYC

SEQ ID NO: 3734 - protein, 38 aa, Homo sapiens
HYNPSLTSRVTIDVDRPKNQFSLKLTSVTAADTAVYYC

SEQ ID NO: 3735 - protein, 38 aa, Homo sapiens
DYAAPVKGRFTISRDDSKNTVYLQMSSLRTEDTAVYYC

SEQ ID NO: 3736 - protein, 38 aa, Homo sapiens
YYKPSLKSRVSISLDTSKSSFSLKLTSVTAADTAVYFC

SEQ ID NO: 3737 - protein, 38 aa, Homo sapiens
YDNPSLKSRVTISVDTSKNQFSLKLSSVTAADTAVYYC

SEQ ID NO: 3738 - protein, 38 aa, Homo sapiens
NYAHKFQGRVTMTRDTSISTAYMELSRLRSDDTAMYYC

SEQ ID NO: 3739 - protein, 38 aa, Homo sapiens
YYNPSLKSRVTISVDTSKKQFSLKLSSVTAADTAVYYC

SEQ ID NO: 3740 - protein, 38 aa, Homo sapiens
YYTDSVEGRFTISRDNSKNVVFLQMNSLRAEDTAVYFC

SEQ ID NO: 3741 - protein, 38 aa, Homo sapiens; identical to SEQ ID NO: 593

SEQ ID NO: 3742 - protein, 38 aa, Homo sapiens; identical to SEQ ID NO: 631

SEQ ID NO: 3743 - protein, 38 aa, Homo sapiens
NYNPSLKSRVTMSVDTSKNQFSLKLSSVTAADTAMYYC

SEQ ID NO: 3744 - protein, 38 aa, Homo sapiens
EYAASLKGRFTISRDDSKSVAYLQMNSLKTEDTAVYFC

SEQ ID NO: 3745 - protein, 38 aa, Homo sapiens; identical to SEQ ID NO: 593

SEQ ID NO: 3746 - protein, 38 aa, Homo sapiens
YYADSVKGRFTISRDNSKNSLYLQMNSLRTEDTALYYC

SEQ ID NO: 3747 - protein, 38 aa, Homo sapiens
NYAQKFQGRVTMTRDTSISTAYMELSRLRSDDTAVYYC

SEQ ID NO: 3748 - protein, 38 aa, Homo sapiens; identical to SEQ ID NO: 593

SEQ ID NO: 3749 - protein, 38 aa, Homo sapiens; identical to SEQ ID NO: 593

SEQ ID NO: 3750 - protein, 38 aa, Homo sapiens; identical to SEQ ID NO: 631

SEQ ID NO: 3751 - protein, 38 aa, Homo sapiens
YYADSLKGRFTISRDNSKNTLYLQMNNLRAEDSGVYFC

SEQ ID NO: 3752 - protein, 38 aa, Homo sapiens [sequence omitted]

SEQ ID NO: 3753 - protein, 38 aa, Homo sapiens; identical to SEQ ID NO: 632

SEQ ID NO: 3754 - protein, 38 aa, Homo sapiens; identical to SEQ ID NO: 593

SEQ ID NO: 3755 - protein, 38 aa, Homo sapiens
NYSPSFQGHVTISADKSISTAYLQWSSLKASDTAMYYC

SEQ ID NO: 3756 - protein, 38 aa, Homo sapiens; identical to SEQ ID NO: 631

SEQ ID NO: 3757 - protein, 38 aa, Homo sapiens; identical to SEQ ID NO: 3746

SEQ ID NO: 3758 - protein, 38 aa, Homo sapiens; identical to SEQ ID NO: 3618

SEQ ID NO: 3759 - protein, 38 aa, Homo sapiens
DYADSVKGRFTFSRDNSKNTVYLQMNSLRAEDTAVYYC

SEQ ID NO: 3760 - protein, 38 aa, Homo sapiens
NYAQKFQGRVTMTRDTAISTAYMELSRLRSDDTAVYYC

SEQ ID NO: 3761 - protein, 38 aa, Homo sapiens; identical to SEQ ID NO: 3746

SEQ ID NO: 3762 - protein, 38 aa, Homo sapiens; identical to SEQ ID NO: 593

SEQ ID NO: 3763 - protein, 38 aa, Homo sapiens
NYNPSFKSRVTISVDSSKNQFSLKLSSVTAADTAVYYC

SEQ ID NO: 3764 - protein, 38 aa, Homo sapiens; identical to SEQ ID NO: 3747

SEQ ID NO: 3765 - protein, 38 aa, Homo sapiens; identical to SEQ ID NO: 593

SEQ ID NO: 3766 - protein, 38 aa, Homo sapiens
YYPGSVKGRFTISRENAKNSLYLQMNSLRAGDTAVYYC

SEQ ID NO: 3767 - protein, 38 aa, Homo sapiens
GYADSVKGRFTIFRNNAKNSLYLQMNSLRAEDTALYYC

SEQ ID NO: 3768 - protein, 38 aa, Homo sapiens
YYADSVKGRFTISRDNSKNTLYLQMNSLRVEDTAVYYC

SEQ ID NO: 3769 - protein, 38 aa, Homo sapiens
DYAAPVKGRFTISRDESKNMLYLQMNSLKTEDTAIYYC

SEQ ID NO: 3770 - protein, 38 aa, Homo sapiens; identical to SEQ ID NO: 593

SEQ ID NO: 3771 - protein, 38 aa, Homo sapiens
FYANSVKGRFTISRDNSKNTLYLQMGSLSAEDMAVYYC

SEQ ID NO: 3772 - protein, 38 aa, Homo sapiens; identical to SEQ ID NO: 593

SEQ ID NO: 3773 - protein, 38 aa, Homo sapiens
YYNPSLKSRVTISVDTSKNQFSLRLSSVTAADTAVYYC

SEQ ID NO: 3774 - protein, 38 aa, Homo sapiens
RYSPSFQGQVTISADTSISTAYLQWSSLKASDTAMYYC

SEQ ID NO: 3775 - protein, 38 aa, Homo sapiens; identical to SEQ ID NO: 593

SEQ ID NO: 3776 - protein, 38 aa, Homo sapiens; identical to SEQ ID NO: 593

SEQ ID NO: 3777 - protein, 38 aa, Homo sapiens; identical to SEQ ID NO: 593

SEQ ID NO: 3778 - protein, 38 aa, Homo sapiens; identical to SEQ ID NO: 631

SEQ ID NO: 3779 - protein, 38 aa, Homo sapiens; identical to SEQ ID NO: 632

SEQ ID NO: 3780 - protein, 38 aa, Homo sapiens
FYAPSLRSRLTVSIDTSNNHFSLNLTSVTAADTAVYYC

SEQ ID NO: 3781 - protein, 38 aa, Homo sapiens
NYADSVKGRFTISRDNAKNSLYLQMNSLRAEDTAVYYC

SEQ ID NO: 3782 - protein, 38 aa, Homo sapiens; identical to SEQ ID NO: 632

SEQ ID NO: 3783 - protein, 38 aa, Homo sapiens; identical to SEQ ID NO: 632

SEQ ID NO: 3784 - protein, 38 aa, Homo sapiens; identical to SEQ ID NO: 3781

SEQ ID NO: 3785 - protein, 38 aa, Homo sapiens; identical to SEQ ID NO: 3746

SEQ ID NO: 3786 - protein, 38 aa, Homo sapiens
YYADSVKGRFTISRDDAKNSLYLEMHSLRAEDTAVYFC

SEQ ID NO: 3787 - protein, 38 aa, Homo sapiens; identical to SEQ ID NO: 593

SEQ ID NO: 3788 - protein, 38 aa, Homo sapiens; identical to SEQ ID NO: 631

SEQ ID NO: 3789 - protein, 38 aa, Homo sapiens
YYADSVRGRFTISRDNAKNSLYLQMNSLRAEDTAVYYC

SEQ ID NO: 3790 - protein, 38 aa, Homo sapiens
YYADSLKGRFTISRDNAKNSLYLQMNSLRAEDTSVYYC

SEQ ID NO: 3791 - protein, 38 aa, Homo sapiens
SYAQKFQGRVTMTRDTSTSTVYMELSSLRSEDTAVYYC

SEQ ID NO: 3792 - protein, 38 aa, Homo sapiens
YYADSVKGRFTISRDNAKNSLYLQMNSLRDEDTAVYYC

SEQ ID NO: 3793 - protein, 38 aa, Homo sapiens; identical to SEQ ID NO: 593

SEQ ID NO: 3794 - protein, 38 aa, Homo sapiens; identical to SEQ ID NO: 593

SEQ ID NO: 3795 - protein, 38 aa, Homo sapiens
NYNPSLKSRVTISVDTSKSNFSLKLRSVTAADTAVYYC

SEQ ID NO: 3796 - protein, 38 aa, Homo sapiens; identical to SEQ ID NO: 3781

SEQ ID NO: 3797 - protein, 38 aa, Homo sapiens
  MOD_RES (3)..(3): Any amino acid
  MOD_RES (7)..(7): Any amino acid
  MOD_RES (9)..(9): Any amino acid
  MOD_RES (14)..(14): Any amino acid
  MOD_RES (20)..(20): Any amino acid
  MOD_RES (24)..(24): Any amino acid
  MOD_RES (26)..(26): Any amino acid
  MOD_RES (28)..(28): Any amino acid
  MOD_RES (35)..(35): Any amino acid
NYXPSFXGXVTFSXDKSISXAYLXWXTXRASDTAXYYC

SEQ ID NO: 3798 - protein, 38 aa, Homo sapiens
NYNPSLKGRVTISVDTSKNQFFLELNSVTAADTAVYYC

SEQ ID NO: 3799 - protein, 38 aa, Homo sapiens; identical to SEQ ID NO: 3747

SEQ ID NO: 3800 - protein, 38 aa, Homo sapiens; identical to SEQ ID NO: 3781

SEQ ID NO: 3801 - protein, 38 aa, Homo sapiens; identical to SEQ ID NO: 593

SEQ ID NO: 3802 - protein, 38 aa, Homo sapiens; identical to SEQ ID NO: 632

SEQ ID NO: 3803 - protein, 38 aa, Homo sapiens; identical to SEQ ID NO: 593

SEQ ID NO: 3804 - protein, 38 aa, Homo sapiens; identical to SEQ ID NO: 593

SEQ ID NO: 3805 - protein, 38 aa, Homo sapiens
  MOD_RES (1)..(1): Any amino acid
XYNPSLKSRVTISVDTSKNQFSLKLSSVTAADTAVYYC

SEQ ID NO: 3806 - protein, 38 aa, Homo sapiens; identical to SEQ ID NO: 593

SEQ ID NO: 3807 - protein, 38 aa, Homo sapiens
YYADSVKGRFTISRDNSKNTVYLQMNSLRAEDTAVYYC

SEQ ID NO: 3808 - protein, 38 aa, Homo sapiens
YYADFVEGRFIISRDNSQNTLFLQMHSLRAEDTAVYYC

SEQ ID NO: 3809 - protein, 38 aa, Homo sapiens; identical to SEQ ID NO: 632

SEQ ID NO: 3810 - protein, 38 aa, Homo sapiens; identical to SEQ ID NO: 3781

SEQ ID NO: 3811 - protein, 38 aa, Homo sapiens
NYAQKFQGRVTMTRDTSITTAYMDLSRLRSDDTAVYYC

SEQ ID NO: 3812 - protein, 13 aa, Homo sapiens
ARGMYYYESYLQH

SEQ ID NO: 3813 - protein, 12 aa, Homo sapiens
TVGDVVHYGLDV

SEQ ID NO: 3814 - protein, 18 aa, Homo sapiens
ATRGTIGPFSYYYYYMDV

SEQ ID NO: 3815 - protein, 14 aa, Homo sapiens
AKGDSPNMEYAFDS

SEQ ID NO: 3816 - protein, 16 aa, Homo sapiens
ARQRGYNYGAKMYFDF

SEQ ID NO: 3817 - protein, 13 aa, Homo sapiens
ARALRGGLTCLDF

SEQ ID NO: 3818 - protein, 20 aa, Homo sapiens
VRGLNQRASIFGDVRYWFDP

SEQ ID NO: 3819 - protein, 15 aa, Homo sapiens
TRANIITAGSSTFDY

SEQ ID NO: 3820 - protein, 16 aa, Homo sapiens
ARDITIFGVARWTFDS

SEQ ID NO: 3821 - protein, 22 aa, Homo sapiens
GKDIKWTYFDSSTYYDGDGFDF

SEQ ID NO: 3822 - protein, 18 aa, Homo sapiens
ATRGTIGPFSYYYYYMDV

SEQ ID NO: 3823 - protein, 18 aa, Homo sapiens
ARGPWFGMSLYAARSFDV

SEQ ID NO: 3824 - protein, 10 aa, Homo sapiens
ARDFDRGAEH

SEQ ID NO: 3825 - protein, 19 aa, Homo sapiens
LREPREGGGGNAFYWYFDL

SEQ ID NO: 3826 - protein, 22 aa, Homo sapiens
ARGLGNRITIYGVLVTRNWLDP

SEQ ID NO: 3827 - protein, 18 aa, Homo sapiens
ARSDDCTNGVCYTRHFDY

SEQ ID NO: 3828 - protein, 14 aa, Homo sapiens
ARHETSPGGDYFNH

SEQ ID NO: 3829 - protein, 20 aa, Homo sapiens
ASLKHNDCFSFGCPHWYLDL

SEQ ID NO: 3830 - protein, 29 aa, Homo sapiens
ASSPIVVVPAAPRELYYSPGGYYYYYMDV

SEQ ID NO: 3831 - protein, 11 aa, Homo sapiens
ARDRGIDAFDI

SEQ ID NO: 3832 - protein, 20 aa, Homo sapiens
ASLKHDDCYSTACPHWYFDL

SEQ ID NO: 3833 - protein, 18 aa, Homo sapiens
LTDQHDGCTSASCHKMDV

SEQ ID NO: 3834 - protein, 16 aa, Homo sapiens
ARYVGNRGPTSYYFDY

SEQ ID NO: 3835 - protein, 15 aa, Homo sapiens
ARVGMSDGYYYVFDS

SEQ ID NO: 3836 - protein, 14 aa, Homo sapiens
ARAGDWDYNPHFAS

SEQ ID NO: 3837 - protein, 12 aa, Homo sapiens
ARIRRGTSGYDY

SEQ ID NO: 3838 - protein, 14 aa, Homo sapiens
ATRGPVVLGEALAY

SEQ ID NO: 3839 - protein, 16 aa, Homo sapiens
TNGLTGPAYVNAEFEF

SEQ ID NO: 3840 - protein, 22 aa, Homo sapiens
VKVSGYASGWLAPFGPVGHLSH

SEQ ID NO: 3841 - protein, 15 aa, Homo sapiens
VGQGKTNWGWTGMPY

SEQ ID NO: 3842 - protein, 9 aa, Homo sapiens
VGGSRSFDI

SEQ ID NO: 3843 - protein, 22 aa, Homo sapiens
ARQVFYDNDDSDGLGYYYGLDV

SEQ ID NO: 3844 - protein, 20 aa, Homo sapiens
ARGLNQRSSIFGVVRHCFDP

SEQ ID NO: 3845 - protein, 17 aa, Homo sapiens
ARGEGYAGVPTPNWFDP

SEQ ID NO: 3846 - protein, 11 aa, Homo sapiens
SRDVDGGYFDY

SEQ ID NO: 3847 - protein, 17 aa, Homo sapiens
ARGEGYAGVPTPNWFDP

SEQ ID NO: 3848 - protein, 17 aa, Homo sapiens
AKDGPTSAHYVQWDFDY

SEQ ID NO: 3849 - protein, 11 aa, Homo sapiens
ARGGVWFGSLR

SEQ ID NO: 3850 - protein, 22 aa, Homo sapiens
AKEYICSGGTCYSFRSYYYMDV

SEQ ID NO: 3851 - protein, 10 aa, Homo sapiens
ARLRDAYSDY

SEQ ID NO: 3852 - protein, 14 aa, Homo sapiens
AKDGLRYFGFYLDS

SEQ ID NO: 3853 - protein, 15 aa, Homo sapiens
AKDSSPGYFFYGMDV

SEQ ID NO: 3854 - protein, 15 aa, Homo sapiens
  MOD_RES (2)..(2): Any amino acid
AXMGWLLVASYYFDH

SEQ ID NO: 3855 - protein, 21 aa, Homo sapiens
ARVARICTNGACYEGAYYFDN

SEQ ID NO: 3856 - protein, 23 aa, Homo sapiens
VKDKGYSSGYDDVAGYYWYTMDV

SEQ ID NO: 3857 - protein, 17 aa, Homo sapiens
AKTRRITATRYYYGMDV

SEQ ID NO: 3858 - protein, 16 aa, Homo sapiens
VRRERPLRSGRAPFDT

SEQ ID NO: 3859 - protein, 17 aa, Homo sapiens
AKGSRYITIFGANPPDY

SEQ ID NO: 3860 - protein, 18 aa, Homo sapiens
ARSRQRGYSSYDKGDFDY

SEQ ID NO: 3861 - protein, 19 aa, Homo sapiens
ARDFHNTIFGVVIPRYFDL

SEQ ID NO: 3862 - protein, 15 aa, Homo sapiens
VKHSVGYAGSGSFDS

SEQ ID NO: 3863 - protein, 13 aa, Homo sapiens
AKDRSGYFYALHF

SEQ ID NO: 3864 - protein, 14 aa, Homo sapiens
ARCPVATPGRGVDY

SEQ ID NO: 3865 - protein, 15 aa, Homo sapiens
VKHNLGYSGSGTFDY

SEQ ID NO: 3866 - protein, 19 aa, Homo sapiens
VYYCARGATYRSSSGYWEY

SEQ ID NO: 3867 - protein, 14 aa, Homo sapiens
AKDPSYGSGSYSQY

SEQ ID NO: 3868 - protein, 14 aa, Homo sapiens
ARDRHDYGEDPFDI

SEQ ID NO: 3869 - protein, 14 aa, Homo sapiens
AKDGLRYFGFYLDS

SEQ ID NO: 3870 - protein, 15 aa, Homo sapiens
TREAGLWPEPYYFDS

SEQ ID NO: 3871 - protein, 15 aa, Homo sapiens
ARQPGRDSSGYYLDS

SEQ ID NO: 3872 - protein, 20 aa, Homo sapiens
AKRSADCSSTSCSGGSWFDP

SEQ ID NO: 3873 - protein, 13 aa, Homo sapiens
ARTIGIVTTYFEY

SEQ ID NO: 3874 - protein, 16 aa, Homo sapiens
ARDRGDVLVAQGAIGY

SEQ ID NO: 3875 - protein, 14 aa, Homo sapiens
ARLHYSTTWHYFDP

SEQ ID NO: 3876 - protein, 16 aa, Homo sapiens
ARDSEATTTRGRWFDP

SEQ ID NO: 3877 - protein, 18 aa, Homo sapiens
AKAGDSGSSHCYYYYMDV

SEQ ID NO: 3878 - protein, 20 aa, Homo sapiens
AKNRNYRPSGDFAEGHWLDP

SEQ ID NO: 3879 - protein, 15 aa, Homo sapiens
TKVDSSPFFDYGMDV

SEQ ID NO: 3880 - protein, 17 aa, Homo sapiens
ARDLLKPPNIDPTVKGL

SEQ ID NO: 3881 - protein, 20 aa, Homo sapiens
TRDIRGGYSYGYFVPYYFDY

SEQ ID NO: 3882 - protein, 17 aa, Homo sapiens
ARMGFVGSFTSGTYIDY

SEQ ID NO: 3883 - protein, 14 aa, Homo sapiens
ARIHDFRSGFPLDY

SEQ ID NO: 3884 - protein, 21 aa, Homo sapiens
ARDDCSITTCRVPNQDHAFDI

SEQ ID NO: 3885 - protein, 16 aa, Homo sapiens
ARAAWRDGNDGYFLDY

SEQ ID NO: 3886 - protein, 12 aa, Homo sapiens
AKRGDWLWYFDV

SEQ ID NO: 3887 - protein, 22 aa, Homo sapiens
ARLVPAEPSGPGNYFYYFFMDV

SEQ ID NO: 3888 - protein, 11 aa, Homo sapiens
ARGTTATGMDV

SEQ ID NO: 3889 - protein, 12 aa, Homo sapiens
ARVGRRSWYVDY

SEQ ID NO: 3890 - protein, 7 aa, Homo sapiens
TRGDPDY

SEQ ID NO: 3891 - protein, 17 aa, Homo sapiens
ARKVRGSSPDPLYYFDY

SEQ ID NO: 3892 - protein, 13 aa, Homo sapiens
TRNSPITVFGVGP

SEQ ID NO: 3893 - protein, 14 aa, Homo sapiens
ARGLNYYYYHGMDV

SEQ ID NO: 3894 - protein, 14 aa, Homo sapiens
ARGLNYYYYHGMDV

SEQ ID NO: 3895 - protein, 16 aa, Homo sapiens
AKLRRGVMLIKYYFDF

SEQ ID NO: 3896 - protein, 14 aa, Homo sapiens
ARDAGRFLAYGMDV

SEQ ID NO: 3897 - protein, 12 aa, Homo sapiens
ATGYGFVGPLAY

SEQ ID NO: 3898 - protein, 9 aa, Homo sapiens
YGGDTEVRY

SEQ ID NO: 3899 - protein, 16 aa, Homo sapiens
VRCFGYSSNTPAYFDY

SEQ ID NO: 3900 - protein, 16 aa, Homo sapiens
ARDFRPYDLLTGLFDS

SEQ ID NO: 3901 - protein, 12 aa, Homo sapiens
ATFSQGGLQNDY

SEQ ID NO: 3902 - protein, 11 aa, Homo sapiens
AIVSRSFVMDV

SEQ ID NO: 3903 - protein, 16 aa, Homo sapiens
AKTLRKRNGYSGPIDS

SEQ ID NO: 3904 - protein, 15 aa, Homo sapiens
ARDDTGISKKNAFDI

SEQ ID NO: 3905 - protein, 19 aa, Homo sapiens
ARDNLPSLYGDYDRNAFDI

SEQ ID NO: 3906 - protein, 13 aa, Homo sapiens
AKGRNYYVDYFDY

SEQ ID NO: 3907 - protein, 14 aa, Homo sapiens
ARGLNYYYYHGMDV

SEQ ID NO: 3908 - protein, 15 aa, Homo sapiens
ARDSRIVPTNYYYDF

SEQ ID NO: 3909 - protein, 12 aa, Homo sapiens
ARDPGGSSSFDY

SEQ ID NO: 3910 - protein, 18 aa, Homo sapiens
ARVRCGGLCYSSDWYFDV

SEQ ID NO: 3911 - protein, 14 aa, Homo sapiens
ARGLNYYFYHGMDL

SEQ ID NO: 3912 - protein, 14 aa, Homo sapiens
AKGLNYYYYHGMDV

SEQ ID NO: 3913 - protein, 20 aa, Homo sapiens
AKDTATVTTSLYFYYHGMDV

SEQ ID NO: 3914 - protein, 16 aa, Homo sapiens
AKSQGPFYSDYVYFES

SEQ ID NO: 3915 - protein, 18 aa, Homo sapiens
AREGSYGDTYHSYYGMDV

SEQ ID NO: 3916 - protein, 14 aa, Homo sapiens
TADLSTSSGHYFDY

SEQ ID NO: 3917 - protein, 12 aa, Homo sapiens
ARHSYALPPRDY

SEQ ID NO: 3918 - protein, 13 aa, Homo sapiens
ARGGGWLQSDFDI

SEQ ID NO: 3919 - protein, 20 aa, Homo sapiens
ASSSGWPSDRYFHHYSGLDV

SEQ ID NO: 3920 - protein, 9 aa, Homo sapiens
AGHTSTTNF

SEQ ID NO: 3921 - protein, 13 aa, Homo sapiens
ARGDCTSTSCYVH

SEQ ID NO: 3922 - protein, 20 aa, Homo sapiens
VREGREYGDRFSVPNWYFDL

SEQ ID NO: 3923 - protein, 18 aa, Homo sapiens
ARHPSYLAVADGRDAFDI

SEQ ID NO: 3924 - protein, 19 aa, Homo sapiens
ARQPPITIFGLLRPGWFGS

SEQ ID NO: 3925 - protein, 18 aa, Homo sapiens
AREGSYGDTYHSYYAMDV

SEQ ID NO: 3926 - protein, 20 aa, Homo sapiens
AREGREYGDRFSVPYWYFDL

SEQ ID NO: 3927 - protein, 13 aa, Homo sapiens
ARGVFSPAYYFEY

SEQ ID NO: 3928 - protein, 13 aa, Homo sapiens
AKIAVSGQWYFDL

SEQ ID NO: 3929 - protein, 11 aa, Homo sapiens
VVFITPTINYT

SEQ ID NO: 3930 - protein, 19 aa, Homo sapiens
ARLGGTGLNGGDFQYGVDI

SEQ ID NO: 3931 - protein, 22 aa, Homo sapiens
SRLNPSRRPPPGVPHYYYGMDV

SEQ ID NO: 3932 - protein, 16 aa, Homo sapiens
TSCWPILNHYSPRPSS

SEQ ID NO: 3933 - protein, 14 aa, Homo sapiens
ASALRYSFVYGMDV

SEQ ID NO: 3934 - protein, 13 aa, Homo sapiens
VKDAYNSGWHFDY

SEQ ID NO: 3935 - protein, 9 aa, Homo sapiens
TKQTGDFDS

SEQ ID NO: 3936 - protein, 16 aa, Homo sapiens
VSSYCRGNNCYGAPNY

SEQ ID NO: 3937 - protein, 18 aa, Homo sapiens
AREGSYGDTYHFYYAMDV

SEQ ID NO: 3938 - protein, 8 aa, Homo sapiens
VTQQSFDL

SEQ ID NO: 3939 - protein, 12 aa, Homo sapiens
AKILPGIYAFDL

SEQ ID NO: 3940 - protein, 16 aa, Homo sapiens
ARTGGYSFDYSDYFDF

SEQ ID NO: 3941 - protein, 14 aa, Homo sapiens
AIPPVPYYYYYSDV

SEQ ID NO: 3942 - protein, 19 aa, Homo sapiens
ARQRRVSIFGLLLPGEFDT

SEQ ID NO: 3943 - protein, 21 aa, Homo sapiens
ARHNDHYCSSTSCYPVGYFDL

SEQ ID NO: 3944 - protein, 20 aa, Homo sapiens
ARALYYYDSSGFPVLYYFDY

SEQ ID NO: 3945 - protein, 14 aa, Homo sapiens
ARLPRGDTLYYFDY

SEQ ID NO: 3946 - protein, 13 aa, Homo sapiens
AKGANWGSWFLDS

SEQ ID NO: 3947 - protein, 21 aa, Homo sapiens
AGRRGYDFWSGYYNYYYGMDV

SEQ ID NO: 3948 - protein, 18 aa, Homo sapiens
AKEGWAYCGGDCYSYFDY

SEQ ID NO: 3949 - protein, 17 aa, Homo sapiens
ARGKRGGNPDFSQRFDP

SEQ ID NO: 3950 - protein, 22 aa, Homo sapiens
ARGGHTAMVTTPYFYYYYGMDV

SEQ ID NO: 3951 - protein, 18 aa, Homo sapiens
ARAPDDFWSGYWGYYFDY

SEQ ID NO: 3952 - protein, 18 aa, Homo sapiens
ANSEWELLGPSTWWYFDL

SEQ ID NO: 3953 - protein, 10 aa, Homo sapiens
AREEGGSYFD

SEQ ID NO: 3954 - protein, 18 aa, Homo sapiens
GRHAVTTWYNWNYHPFDY

SEQ ID NO: 3955 - protein, 16 aa, Homo sapiens
ARHPVNYGDYVEWFDP

SEQ ID NO: 3956 - protein, 13 aa, Homo sapiens
ARDSEGSGWYFDY

SEQ ID NO: 3957 - protein, 20 aa, Homo sapiens
AKVGWSLQWLNLGYSNDMDV

SEQ ID NO: 3958 - protein, 20 aa, Homo sapiens
ARSHTSGSYLWRDLPYWFDP

SEQ ID NO: 3959 - protein, 25 aa, Homo sapiens
AREGHRHSSRWRDTGYYYYYYYMDV

SEQ ID NO: 3960 - protein, 18 aa, Homo sapiens
ARDSNEAARGSEYWYFDL

SEQ ID NO: 3961 - protein, 20 aa, Homo sapiens
  MOD_RES (20)..(20): Any amino acid
ARQDYYDSSGYSTEYYGMDX

SEQ ID NO: 3962 - protein, 19 aa, Homo sapiens
AKDQSGFVLMVYAIHSPGY

SEQ ID NO: 3963 - protein, 6 aa, Homo sapiens
AKDGGD

SEQ ID NO: 3964 - protein, 16 aa, Homo sapiens
AREGSSSWEFYNWFDP

SEQ ID NO: 3965 - protein, 13 aa, Homo sapiens
AKLMVDLDYYMDV

SEQ ID NO: 3966 - protein, 17 aa, Homo sapiens
ARDPTPYSNAQLCWFDP

SEQ ID NO: 3967 - protein, 15 aa, Homo sapiens
AKDPLRYSSLYGMDV

SEQ ID NO: 3968 - protein, 18 aa, Homo sapiens
ARGQDYDILTRSSYYMDV

SEQ ID NO: 3969 - protein, 15 aa, Homo sapiens
ARESHDYSNYRFFDS

SEQ ID NO: 3970 - protein, 24 aa, Homo sapiens
ASPLGYCSSTSCYRTYYYYYGMDV

SEQ ID NO: 3971 - protein, 17 aa, Homo sapiens
ARLTVPSIRSWSSRFDP

SEQ ID NO: 3972 - protein, 8 aa, Homo sapiens
ARDLSMDV

SEQ ID NO: 3973 - protein, 11 aa, Homo sapiens
SQGDGTVGFHY

SEQ ID NO: 3974 - protein, 12 aa, Homo sapiens
ARIHYGDYFVDS

SEQ ID NO: 3975 - protein, 9 aa, Homo sapiens
TTGTTYFDY

SEQ ID NO: 3976 - protein, 18 aa, Homo sapiens
ARHAVTTWYNWNYHPFDY

SEQ ID NO: 3977 - protein, 14 aa, Homo sapiens
ARDGGDEFAEYFQH

SEQ ID NO: 3978 - protein, 19 aa, Homo sapiens
ASQVGLRVVISYYYYYMDV

SEQ ID NO: 3979 - protein, 16 aa, Homo sapiens
ARHPVEYSSLAGAFDI

SEQ ID NO: 3980 - protein, 17 aa, Homo sapiens
ARQGAGDLPYKYYFMDV

SEQ ID NO: 3981 - protein, 15 aa, Homo sapiens
ARHPVEYSSSSGFDY

SEQ ID NO: 3982 - protein, 16 aa, Homo sapiens
ASLYYDFWSGYFGGDY

SEQ ID NO: 3983 - protein, 17 aa, Homo sapiens
ARSTPYNWNSPSPAFDY

SEQ ID NO: 3984 - protein, 11 aa, Homo sapiens
ARDRENWYFDL

SEQ ID NO: 3985 - protein, 15 aa, Homo sapiens
ARDGDSSGWYARFDY

SEQ ID NO: 3986 - protein, 14 aa, Homo sapiens
ARGLRDPLSWYLDV

SEQ ID NO: 3987 - protein, 17 aa, Homo sapiens
ARDPDQLFVQDPYYFDY

SEQ ID NO: 3988 - protein, 21 aa, Homo sapiens
ARGSLDDFWSGWIEDYYYMDV

SEQ ID NO: 3989 - protein, 21 aa, Homo sapiens
ARGSLDDFWSGWIEDYYYMDV

SEQ ID NO: 3990 - protein, 17 aa, Homo sapiens
ARDPDQLFVQDPYYFDY

SEQ ID NO: 3991 - protein, 17 aa, Homo sapiens
AKDPTPYSGRYFTWFDP

SEQ ID NO: 3992 - protein, 17 aa, Homo sapiens
ARDPGGFGVVAPYYFDY

SEQ ID NO: 3993 - protein, 16 aa, Homo sapiens
ARHPVNYGDYVEWFDP

SEQ ID NO: 3994 - protein, 13 aa, Homo sapiens
ARDSEGSGWYFDY

SEQ ID NO: 3995 - protein, 22 aa, Homo sapiens
ARVGTERITIFGVVISAAAMDV

SEQ ID NO: 3996 - protein, 19 aa, Homo sapiens
ARSVYDTKPMTYYYYYMDV

SEQ ID NO: 3997 - protein, 16 aa, Homo sapiens
ARGVLLWFGENENNDY

SEQ ID NO: 3998 - protein, 18 aa, Homo sapiens
ARRGGACGSGGSCLPFDY

SEQ ID NO: 3999 - protein, 15 aa, Homo sapiens
ARHGVEYSTSSCFDY

SEQ ID NO: 4000 - protein, 13 aa, Homo sapiens
ARGRSGSSWDFGY

SEQ ID NO: 4001 - protein, 17 aa, Homo sapiens
ARGKRGGNPDFSQRFDP

SEQ ID NO: 4002 - protein, 17 aa, Homo sapiens
ARDPDQLFVQDPYYFDY

SEQ ID NO: 4003 - protein, 9 aa, Homo sapiens
ARQRSEHDY

SEQ ID NO: 4004 - protein, 14 aa, Homo sapiens
ARPSREGYLDYFDV

SEQ ID NO: 4005 - protein, 22 aa, Homo sapiens
ATSTLNIVATIGPHYYYYGMDV

SEQ ID NO: 4006 - protein, 17 aa, Homo sapiens
ARDPDQLFVQDPYYFDY

SEQ ID NO: 4007 - protein, 14 aa, Homo sapiens
ARHLRGDFVGQFDY

SEQ ID NO: 4008 - protein, 21 aa, Homo sapiens
ARGSLDDFWSGWIEDYYYMDV

SEQ ID NO: 4009 - protein, 18 aa, Homo sapiens
AGKTYDFWSGYPIKVVDY

SEQ ID NO: 4010 - protein, 18 aa, Homo sapiens
ARAPDDFWSGYWGYYFDY

SEQ ID NO: 4011 - protein, 19 aa, Homo sapiens
ARLKGGWELLIYYYYYMDV

SEQ ID NO: 4012 - protein, 15 aa, Homo sapiens
ARRGEGYSSSSSFDY

SEQ ID NO: 4013 - protein, 13 aa, Homo sapiens
AKDSEGYEYYFDY

SEQ ID NO: 4014 - protein, 13 aa, Homo sapiens
GRVAGGTYSWFDF

SEQ ID NO: 4015 - protein, 17 aa, Homo sapiens
ASLRVDTAMVTWGDQDY

SEQ ID NO: 4016 - protein, 17 aa, Homo sapiens
ARDPDQLFVQDPYYFDY

SEQ ID NO: 4017 - protein, 26 aa, Homo sapiens
ARIGVKGGSYDFWSGYYPNPGGYFDY

SEQ ID NO: 4018 - protein, 15 aa, Homo sapiens
CARGMYYYESYLQHW

SEQ ID NO: 4019 - protein, 14 aa, Homo sapiens
CTVGDVVHYGLDVW

SEQ ID NO: 4020 - protein, 20 aa, Homo sapiens
CATRGTIGPFSYYYYYMDVW

SEQ ID NO: 4021 - protein, 16 aa, Homo sapiens
CAKGDSPNMEYAFDSW

SEQ ID NO: 4022 - protein, 18 aa, Homo sapiens
CARQRGYNYGAKMYFDFW

SEQ ID NO: 4023 - protein, 15 aa, Homo sapiens
CARALRGGLTCLDFW

SEQ ID NO: 4024 - protein, 22 aa, Homo sapiens
CVRGLNQRASIFGDVRYWFDPW

SEQ ID NO: 4025 - protein, 17 aa, Homo sapiens
CTRANIITAGSSTFDYW

SEQ ID NO: 4026 - protein, 18 aa, Homo sapiens
CARDITIFGVARWTFDSW

SEQ ID NO: 4027 - protein, 24 aa, Homo sapiens
CGKDIKWTYFDSSTYYDGDGFDFW

SEQ ID NO: 4028 - protein, 20 aa, Homo sapiens
CATRGTIGPFSYYYYYMDVW

SEQ ID NO: 4029 - protein, 20 aa, Homo sapiens
CARGPWFGMSLYAARSFDVW

SEQ ID NO: 4030 - protein, 12 aa, Homo sapiens
CARDFDRGAEHW

SEQ ID NO: 4031 - protein, 21 aa, Homo sapiens
CLREPREGGGGNAFYWYFDLW

SEQ ID NO: 4032 - protein, 24 aa, Homo sapiens
CARGLGNRITIYGVLVTRNWLDPW

SEQ ID NO: 4033 - protein, 20 aa, Homo sapiens
CARSDDCTNGVCYTRHFDYW

SEQ ID NO: 4034 - protein, 16 aa, Homo sapiens
CARHETSPGGDYFNHW

SEQ ID NO: 4035 - protein, 22 aa, Homo sapiens
CASLKHNDCFSFGCPHWYLDLW

SEQ ID NO: 4036 - protein, 31 aa, Homo sapiens
CASSPIVVVPAAPRELYYSPGGYYYYYMDVW

SEQ ID NO: 4037 - protein, 13 aa, Homo sapiens
CARDRGIDAFDIW

SEQ ID NO: 4038 - protein, 22 aa, Homo sapiens
CASLKHDDCYSTACPHWYFDLW

SEQ ID NO: 4039 - protein, 20 aa, Homo sapiens
CLTDQHDGCTSASCHKMDVW

SEQ ID NO: 4040 - protein, 18 aa, Homo sapiens
CARYVGNRGPTSYYFDYW

SEQ ID NO: 4041 - protein, 17 aa, Homo sapiens
CARVGMSDGYYYVFDSW

SEQ ID NO: 4042 - protein, 16 aa, Homo sapiens
CARAGDWDYNPHFASW

SEQ ID NO: 4043 - protein, 14 aa, Homo sapiens
CARIRRGTSGYDYW

SEQ ID NO: 4044 - protein, 16 aa, Homo sapiens
CATRGPVVLGEALAYW

SEQ ID NO: 4045 - protein, 18 aa, Homo sapiens
CTNGLTGPAYVNAEFEFW

SEQ ID NO: 4046 - protein, 24 aa, Homo sapiens
CVKVSGYASGWLAPFGPVGHLSHW

SEQ ID NO: 4047 - protein, 17 aa, Homo sapiens
CVGQGKTNWGWTGMPYW

SEQ ID NO: 4048 - protein, 11 aa, Homo sapiens
CVGGSRSFDIW

SEQ ID NO: 4049 - protein, 24 aa, Homo sapiens
CARQVFYDNDDSDGLGYYYGLDVW

SEQ ID NO: 4050 - protein, 22 aa, Homo sapiens
CARGLNQRSSIFGVVRHCFDPW

SEQ ID NO: 4051 - protein, 19 aa, Homo sapiens
CARGEGYAGVPTPNWFDPW

SEQ ID NO: 4052 - protein, 13 aa, Homo sapiens
CSRDVDGGYFDYW

SEQ ID NO: 4053 - protein, 19 aa, Homo sapiens
CARGEGYAGVPTPNWFDPW

SEQ ID NO: 4054 - protein, 19 aa, Homo sapiens
CAKDGPTSAHYVQWDFDYW

SEQ ID NO: 4055 - protein, 13 aa, Homo sapiens
CARGGVWFGSLRW

SEQ ID NO: 4056 - protein, 24 aa, Homo sapiens
CAKEYICSGGTCYSFRSYYYMDVW

SEQ ID NO: 4057 - protein, 12 aa, Homo sapiens
CARLRDAYSDYW

SEQ ID NO: 4058 - protein, 16 aa, Homo sapiens
CAKDGLRYFGFYLDSW

SEQ ID NO: 4059 - protein, 17 aa, Homo sapiens
CAKDSSPGYFFYGMDVW

SEQ ID NO: 4060 - protein, 17 aa, Homo sapiens
  MOD_RES (3)..(3): Any amino acid
CAXMGWLLVASYYFDHW

SEQ ID NO: 4061 - protein, 23 aa, Homo sapiens
CARVARICTNGACYEGAYYFDNW

SEQ ID NO: 4062 - protein, 25 aa, Homo sapiens
CVKDKGYSSGYDDVAGYYWYTMDVW

SEQ ID NO: 4063 - protein, 19 aa, Homo sapiens
CAKTRRITATRYYYGMDVW

SEQ ID NO: 4064 - protein, 18 aa, Homo sapiens
CVRRERPLRSGRAPFDTW

SEQ ID NO: 4065 - protein, 19 aa, Homo sapiens
CAKGSRYITIFGANPPDYW

SEQ ID NO: 4066 - protein, 20 aa, Homo sapiens
CARSRQRGYSSYDKGDFDYW

SEQ ID NO: 4067 - protein, 21 aa, Homo sapiens
CARDFHNTIFGVVIPRYFDLW

SEQ ID NO: 4068 - protein, 17 aa, Homo sapiens
CVKHSVGYAGSGSFDSW

SEQ ID NO: 4069 - protein, 15 aa, Homo sapiens
CAKDRSGYFYALHFW

SEQ ID NO: 4070 - protein, 16 aa, Homo sapiens
CARCPVATPGRGVDYW

SEQ ID NO: 4071 - protein, 17 aa, Homo sapiens
CVKHNLGYSGSGTFDYW

SEQ ID NO: 4072 - protein, 21 aa, Homo sapiens
AVYYCARGATYRSSSGYWEYW

SEQ ID NO: 4073 - protein, 16 aa, Homo sapiens
CAKDPSYGSGSYSQYW

SEQ ID NO: 4074 - protein, 16 aa, Homo sapiens
CARDRHDYGEDPFDIW

SEQ ID NO: 4075 - protein, 16 aa, Homo sapiens
CAKDGLRYFGFYLDSW

SEQ ID NO: 4076 - protein, 17 aa, Homo sapiens
CTREAGLWPEPYYFDSW

SEQ ID NO: 4077 - protein, 17 aa, Homo sapiens
CARQPGRDSSGYYLDSW

SEQ ID NO: 4078 - protein, 22 aa, Homo sapiens
CAKRSADCSSTSCSGGSWFDPW

SEQ ID NO: 4079 - protein, 15 aa, Homo sapiens
CARTIGIVTTYFEYW

SEQ ID NO: 4080 - protein, 18 aa, Homo sapiens
CARDRGDVLVAQGAIGYW

SEQ ID NO: 4081 - protein, 16 aa, Homo sapiens
CARLHYSTTWHYFDPW

SEQ ID NO: 4082 - protein, 18 aa, Homo sapiens
CARDSEATTTRGRWFDPW

SEQ ID NO: 4083 - protein, 20 aa, Homo sapiens
CAKAGDSGSSHCYYYYMDVW

SEQ ID NO: 4084 - protein, 22 aa, Homo sapiens
CAKNRNYRPSGDFAEGHWLDPW

SEQ ID NO: 4085 - protein, 17 aa, Homo sapiens
CTKVDSSPFFDYGMDVW

SEQ ID NO: 4086 - protein, 19 aa, Homo sapiens
CARDLLKPPNIDPTVKGLW

SEQ ID NO: 4087 - protein, 22 aa, Homo sapiens
CTRDIRGGYSYGYFVPYYFDYW

SEQ ID NO: 4088 - protein, 19 aa, Homo sapiens
CARMGFVGSFTSGTYIDYW

SEQ ID NO: 4089 - protein, 16 aa, Homo sapiens
CARIHDFRSGFPLDYW

SEQ ID NO: 4090 - protein, 23 aa, Homo sapiens
CARDDCSITTCRVPNQDHAFDIW

SEQ ID NO: 4091 - protein, 18 aa, Homo sapiens
CARAAWRDGNDGYFLDYW

SEQ ID NO: 4092 - protein, 14 aa, Homo sapiens
CAKRGDWLWYFDVW

SEQ ID NO: 4093 - protein, 24 aa, Homo sapiens
CARLVPAEPSGPGNYFYYFFMDVW

SEQ ID NO: 4094 - protein, 13 aa, Homo sapiens
CARGTTATGMDVW

SEQ ID NO: 4095 - protein, 14 aa, Homo sapiens
CARVGRRSWYVDYW

SEQ ID NO: 4096 - protein, 9 aa, Homo sapiens
CTRGDPDYW

SEQ ID NO: 4097 - protein, 19 aa, Homo sapiens
CARKVRGSSPDPLYYFDYW

SEQ ID NO: 4098 - protein, 15 aa, Homo sapiens
CTRNSPITVFGVGPW

SEQ ID NO: 4099 - protein, 16 aa, Homo sapiens
CARGLNYYYYHGMDVW

SEQ ID NO: 4100 - protein, 16 aa, Homo sapiens
CARGLNYYYYHGMDVW

SEQ ID NO: 4101 - protein, 18 aa, Homo sapiens
CAKLRRGVMLIKYYFDFW

SEQ ID NO: 4102 - protein, 16 aa, Homo sapiens
CARDAGRFLAYGMDVW

SEQ ID NO: 4103 - protein, 14 aa, Homo sapiens
CATGYGFVGPLAYW

SEQ ID NO: 4104 - protein, 11 aa, Homo sapiens
CYGGDTEVRYW

SEQ ID NO: 4105 - protein, 18 aa, Homo sapiens
CVRCFGYSSNTPAYFDYW

SEQ ID NO: 4106 - protein, 18 aa, Homo sapiens
CARDFRPYDLLTGLFDSW

SEQ ID NO: 4107 - protein, 14 aa, Homo sapiens
CATFSQGGLQNDYW

SEQ ID NO: 4108 - protein, 13 aa, Homo sapiens
CAIVSRSFVMDVW

SEQ ID NO: 4109 - protein, 18 aa, Homo sapiens
CAKTLRKRNGYSGPIDSW

SEQ ID NO: 4110 - protein, 17 aa, Homo sapiens
CARDDTGISKKNAFDIW

SEQ ID NO: 4111 - protein, 21 aa, Homo sapiens
CARDNLPSLYGDYDRNAFDIW

SEQ ID NO: 4112 - protein, 15 aa, Homo sapiens
CAKGRNYYVDYFDYW

SEQ ID NO: 4113 - protein, 16 aa, Homo sapiens
CARGLNYYYYHGMDVW

SEQ ID NO: 4114 - protein, 17 aa, Homo sapiens
CARDSRIVPTNYYYDFW

SEQ ID NO: 4115 - protein, 14 aa, Homo sapiens [sequence omitted]

SEQ ID NO: 4116 - protein, 20 aa, Homo sapiens
CARVRCGGLCYSSDWYFDVW

SEQ ID NO: 4117 - protein, 16 aa, Homo sapiens
CARGLNYYFYHGMDLW

SEQ ID NO: 4118 - protein, 16 aa, Homo sapiens
CAKGLNYYYYHGMDVW

SEQ ID NO: 4119 - protein, 22 aa, Homo sapiens
CAKDTATVTTSLYFYYHGMDVW

SEQ ID NO: 4120 - protein, 18 aa, Homo sapiens
CAKSQGPFYSDYVYFESW

SEQ ID NO: 4121 - protein, 20 aa, Homo sapiens
CAREGSYGDTYHSYYGMDVW

SEQ ID NO: 4122 - protein, 16 aa, Homo sapiens
CTADLSTSSGHYFDYW

SEQ ID NO: 4123 - protein, 14 aa, Homo sapiens
CARHSYALPPRDYW

SEQ ID NO: 4124 - protein, 15 aa, Homo sapiens
CARGGGWLQSDFDIW

SEQ ID NO: 4125 - protein, 22 aa, Homo sapiens
CASSSGWPSDRYFHHYSGLDVW

SEQ ID NO: 4126 - protein, 11 aa, Homo sapiens
CAGHTSTTNFW

SEQ ID NO: 4127 - protein, 15 aa, Homo sapiens
CARGDCTSTSCYVHW

SEQ ID NO: 4128 - protein, 22 aa, Homo sapiens
CVREGREYGDRFSVPNWYFDLW

SEQ ID NO: 4129 - protein, 20 aa, Homo sapiens
CARHPSYLAVADGRDAFDIW

SEQ ID NO: 4130 - protein, 21 aa, Homo sapiens
CARQPPITIFGLLRPGWFGSW

SEQ ID NO: 4131 - protein, 20 aa, Homo sapiens
CAREGSYGDTYHSYYAMDVW

SEQ ID NO: 4132 - protein, 22 aa, Homo sapiens
CAREGREYGDRFSVPYWYFDLW

SEQ ID NO: 4133 - protein, 15 aa, Homo sapiens
CARGVFSPAYYFEYW

SEQ ID NO: 4134 - protein, 15 aa, Homo sapiens
CAKIAVSGQWYFDLW

SEQ ID NO: 4135 - protein, 13 aa, Homo sapiens
CVVFITPTINYTW

SEQ ID NO: 4136 - protein, 21 aa, Homo sapiens
CARLGGTGLNGGDFQYGVDIW

SEQ ID NO: 4137 - protein, 24 aa, Homo sapiens
CSRLNPSRRPPPGVPHYYYGMDVW

SEQ ID NO: 4138 - protein, 18 aa, Homo sapiens
CTSCWPILNHYSPRPSSW

SEQ ID NO: 4139 - protein, 16 aa, Homo sapiens
CASALRYSFVYGMDVW

SEQ ID NO: 4140 - protein, 15 aa, Homo sapiens
CVKDAYNSGWHFDYW

SEQ ID NO: 4141 - protein, 11 aa, Homo sapiens
CTKQTGDFDSW

SEQ ID NO: 4142 - protein, 18 aa, Homo sapiens
CVSSYCRGNNCYGAPNYW

SEQ ID NO: 4143 - protein, 20 aa, Homo sapiens
CAREGSYGDTYHFYYAMDVW

SEQ ID NO: 4144 - protein, 10 aa, Homo sapiens
CVTQQSFDLW

SEQ ID NO: 4145 - protein, 14 aa, Homo sapiens
CAKILPGIYAFDLW

SEQ ID NO: 4146 - protein, 18 aa, Homo sapiens
CARTGGYSFDYSDYFDFW

SEQ ID NO: 4147 - protein, 16 aa, Homo sapiens
CAIPPVPYYYYYSDVW

SEQ ID NO: 4148 - protein, 21 aa, Homo sapiens
CARQRRVSIFGLLLPGEFDTW

SEQ ID NO: 4149 - protein, 23 aa, Homo sapiens
CARHNDHYCSSTSCYPVGYFDLW

SEQ ID NO: 4150 - protein, 22 aa, Homo sapiens
CARALYYYDSSGFPVLYYFDYW

SEQ ID NO: 4151 - protein, 16 aa, Homo sapiens
CARLPRGDTLYYFDYW

SEQ ID NO: 4152 - protein, 15 aa, Homo sapiens
CAKGANWGSWFLDSW

SEQ ID NO: 4153 - protein, 23 aa, Homo sapiens
CAGRRGYDFWSGYYNYYYGMDVW

SEQ ID NO: 4154 - protein, 20 aa, Homo sapiens
CAKEGWAYCGGDCYSYFDYW

SEQ ID NO: 4155 - protein, 19 aa, Homo sapiens
CARGKRGGNPDFSQRFDPW

SEQ ID NO: 4156 - protein, 24 aa, Homo sapiens
CARGGHTAMVTTPYFYYYYGMDVW

SEQ ID NO: 4157 - protein, 20 aa, Homo sapiens
CARAPDDFWSGYWGYYFDYW

SEQ ID NO: 4158 - protein, 20 aa, Homo sapiens
CANSEWELLGPSTWWYFDLW

SEQ ID NO: 4159 - protein, 12 aa, Homo sapiens
CAREEGGSYFDW

SEQ ID NO: 4160 - protein, 20 aa, Homo sapiens
CGRHAVTTWYNWNYHPFDYW

SEQ ID NO: 4161 - protein, 18 aa, Homo sapiens
CARHPVNYGDYVEWFDPW

SEQ ID NO: 4162 - protein, 15 aa, Homo sapiens
CARDSEGSGWYFDYW

SEQ ID NO: 4163 - protein, 22 aa, Homo sapiens
CAKVGWSLQWLNLGYSNDMDVW

SEQ ID NO: 4164 - protein, 22 aa, Homo sapiens
CARSHTSGSYLWRDLPYWFDPW

SEQ ID NO: 4165 - protein, 27 aa, Homo sapiens
CAREGHRHSSRWRDTGYYYYYYYMDVW

SEQ ID NO: 4166 - protein, 20 aa, Homo sapiens
CARDSNEAARGSEYWYFDLW

SEQ ID NO: 4167 - protein, 22 aa, Homo sapiens
  MOD_RES (21)..(21): Any amino acid
CARQDYYDSSGYSTEYYGMDXW

SEQ ID NO: 4168 - protein, 21 aa, Homo sapiens
CAKDQSGFVLMVYAIHSPGYW

SEQ ID NO: 4169 - protein, 8 aa, Homo sapiens
CAKDGGDL

SEQ ID NO: 4170 - protein, 18 aa, Homo sapiens
CAREGSSSWEFYNWFDPW

SEQ ID NO: 4171 - protein, 15 aa, Homo sapiens
CAKLMVDLDYYMDVW

SEQ ID NO: 4172 - protein, 19 aa, Homo sapiens
CARDPTPYSNAQLCWFDPW

SEQ ID NO: 4173 - protein, 17 aa, Homo sapiens
CAKDPLRYSSLYGMDVW

SEQ ID NO: 4174 - protein, 20 aa, Homo sapiens
CARGQDYDILTRSSYYMDVW

SEQ ID NO: 4175 - protein, 17 aa, Homo sapiens
CARESHDYSNYRFFDSW

SEQ ID NO: 4176 - protein, 26 aa, Homo sapiens
CASPLGYCSSTSCYRTYYYYYGMDVW

SEQ ID NO: 4177 - protein, 19 aa, Homo sapiens
CARLTVPSIRSWSSRFDPW

SEQ ID NO: 4178 - protein, 10 aa, Homo sapiens
CARDLSMDVW

SEQ ID NO: 4179 - protein, 13 aa, Homo sapiens
CSQGDGTVGFHYW

SEQ ID NO: 4180 - protein, 14 aa, Homo sapiens
CARIHYGDYFVDSW

SEQ ID NO: 4181 - protein, 11 aa, Homo sapiens
CTTGTTYFDYW

SEQ ID NO: 4182 - protein, 20 aa, Homo sapiens
CARHAVTTWYNWNYHPFDYW

SEQ ID NO: 4183 - protein, 16 aa, Homo sapiens
CARDGGDEFAEYFQHW

SEQ ID NO: 4184 - protein, 21 aa, Homo sapiens
CASQVGLRVVISYYYYYMDVW

SEQ ID NO: 4185 - protein, 18 aa, Homo sapiens
CARHPVEYSSLAGAFDIW

SEQ ID NO: 4186 - protein, 19 aa, Homo sapiens
CARQGAGDLPYKYYFMDVW

SEQ ID NO: 4187 - protein, 17 aa, Homo sapiens
CARHPVEYSSSSGFDYW

SEQ ID NO: 4188 - protein, 18 aa, Homo sapiens
CASLYYDFWSGYFGGDYW

SEQ ID NO: 4189 - protein, 19 aa, Homo sapiens
CARSTPYNWNSPSPAFDYW

SEQ ID NO: 4190 - protein, 13 aa, Homo sapiens
CARDRENWYFDLW

SEQ ID NO: 4191 - protein, 17 aa, Homo sapiens
CARDGDSSGWYARFDYW

SEQ ID NO: 4192 - protein, 16 aa, Homo sapiens
CARGLRDPLSWYLDVW

SEQ ID NO: 4193 - protein, 19 aa, Homo sapiens
CARDPDQLFVQDPYYFDYW

SEQ ID NO: 4194 - protein, 23 aa, Homo sapiens
CARGSLDDFWSGWIEDYYYMDVW

SEQ ID NO: 4195 - protein, 23 aa, Homo sapiens
CARGSLDDFWSGWIEDYYYMDVW

SEQ ID NO: 4196 - protein, 19 aa, Homo sapiens
CARDPDQLFVQDPYYFDYW

SEQ ID NO: 4197 - protein, 19 aa, Homo sapiens
CAKDPTPYSGRYFTWFDPW

SEQ ID NO: 4198 - protein, 19 aa, Homo sapiens
CARDPGGFGVVAPYYFDYW

SEQ ID NO: 4199 - protein, 18 aa, Homo sapiens
CARHPVNYGDYVEWFDPW

SEQ ID NO: 4200 - protein, 15 aa, Homo sapiens
CARDSEGSGWYFDYW

SEQ ID NO: 4201 - protein, 24 aa, Homo sapiens
CARVGTERITIFGVVISAAAMDVW

SEQ ID NO: 4202 - protein, 21 aa, Homo sapiens
CARSVYDTKPMTYYYYYMDVW

SEQ ID NO: 4203 - protein, 18 aa, Homo sapiens
CARGVLLWFGENENNDYW

SEQ ID NO: 4204 - protein, 20 aa, Homo sapiens
CARRGGACGSGGSCLPFDYW

SEQ ID NO: 4205 - protein, 17 aa, Homo sapiens
CARHGVEYSTSSCFDYW

SEQ ID NO: 4206 - protein, 15 aa, Homo sapiens
CARGRSGSSWDFGYW

SEQ ID NO: 4207 - protein, 19 aa, Homo sapiens
CARGKRGGNPDFSQRFDPW

SEQ ID NO: 4208 - protein, 19 aa, Homo sapiens
CARDPDQLFVQDPYYFDYW

SEQ ID NO: 4209 - protein, 11 aa, Homo sapiens
CARQRSEHDYW

SEQ ID NO: 4210 - protein, 16 aa, Homo sapiens
CARPSREGYLDYFDVW

SEQ ID NO: 4211 - protein, 24 aa, Homo sapiens
CATSTLNIVATIGPHYYYYGMDVW

SEQ ID NO: 4212 - protein, 19 aa, Homo sapiens
CARDPDQLFVQDPYYFDYW

SEQ ID NO: 4213 - protein, 16 aa, Homo sapiens
CARHLRGDFVGQFDYW

SEQ ID NO: 4214 - protein, 23 aa, Homo sapiens
CARGSLDDFWSGWIEDYYYMDVW

SEQ ID NO: 4215 - protein, 20 aa, Homo sapiens
CAGKTYDFWSGYPIKVVDYW

SEQ ID NO: 4216 - protein, 20 aa, Homo sapiens
CARAPDDFWSGYWGYYFDYW

SEQ ID NO: 4217 - protein, 21 aa, Homo sapiens
CARLKGGWELLIYYYYYMDVW

SEQ ID NO: 4218 - protein, 17 aa, Homo sapiens
CARRGEGYSSSSSFDYW

SEQ ID NO: 4219 - protein, 15 aa, Homo sapiens
CAKDSEGYEYYFDYW

SEQ ID NO: 4220 - protein, 15 aa, Homo sapiens
CGRVAGGTYSWFDFW

SEQ ID NO: 4221 - protein, 19 aa, Homo sapiens
CASLRVDTAMVTWGDQDYW

SEQ ID NO: 4222 - protein, 19 aa, Homo sapiens
CARDPDQLFVQDPYYFDYW

SEQ ID NO: 4223 - protein, 28 aa, Homo sapiens
CARIGVKGGSYDFWSGYYPNPGGYFDYW

SEQ ID NO: 4224 - protein, 15 aa, Homo sapiens
YLQHWGQGTLVTVSS

SEQ ID NO: 4225 - protein, 16 aa, Homo sapiens
YGLDVWGKGTPVIVSS

SEQ ID NO: 4226 - protein, 19 aa, Homo sapiens
YYYYYMDVWGKGTTVTVSS

SEQ ID NO: 4227 - protein, 14 aa, Homo sapiens
FDSWGQGTLVAVTS

SEQ ID NO: 4228 - protein, 15 aa, Homo sapiens
YFDFWGQGIRVTVSS

SEQ ID NO: 4229 - protein, 13 aa, Homo sapiens
DFWGQGTLVTVSS

SEQ ID NO: 4230 - protein, 15 aa, Homo sapiens
WFDPWGQGALVTVSS

SEQ ID NO: 4231 - protein, 14 aa, Homo sapiens
FDYWGQGTLVTVSS

SEQ ID NO: 4232 - protein, 11 aa, Homo sapiens
WGQGTLVTVSS

SEQ ID NO: 4233 - protein, 9 aa, Homo sapiens
WGQGTMVTV

SEQ ID NO: 4234 - protein, 20 aa, Homo sapiens
SYYYYYMDVWGKGTTVTVSS

SEQ ID NO: 4235 - protein, 14 aa, Homo sapiens
FDVWGQGTLVTVSS

SEQ ID NO: 4236 - protein, 13 aa, Homo sapiens
EHWGHGTLVTVSS

SEQ ID NO: 4237 - protein, 17 aa, Homo sapiens
YWYFDLWGRGTLVTVSS

SEQ ID NO: 4238 - protein, 16 aa, Homo sapiens
NWLDPWGQGSLVTVSS

SEQ ID NO: 4239 - protein, 14 aa, Homo sapiens
FDYWGQGTLVTVSS

SEQ ID NO: 4240 - protein, 15 aa, Homo sapiens
YFNHWGQGSLVTVSS

SEQ ID NO: 4241 - protein, 16 aa, Homo sapiens
WYLDLWGRGVLVTVSS

SEQ ID NO: 4242 - protein, 19 aa, Homo sapiens
YYYYYMDVWGKGTTVTVSS

SEQ ID NO: 4243 - protein, 16 aa, Homo sapiens
DAFDIWGQGTMVTVSS

SEQ ID NO: 4244 - protein, 16 aa, Homo sapiens
WYFDLWGRGALVTVSS

SEQ ID NO: 4245 - protein, 14 aa, Homo sapiens
MDVWGRGTTVTVSS

SEQ ID NO: 4246 - protein, 15 aa, Homo sapiens
YFDYWGQGTLVTVSS

SEQ ID NO: 4247 - protein, 14 aa, Homo sapiens
FDSWGQGTLVTVSS

SEQ ID NO: 4248 - protein, 12 aa, Homo sapiens
FASWGHGTLVTV

SEQ ID NO: 4249 - protein, 13 aa, Homo sapiens
DYWGQGTLVTVSS

SEQ ID NO: 4250 - protein, 13 aa, Homo sapiens
AYWGQGALVTVSS

SEQ ID NO: 4251 - protein, 14 aa, Homo sapiens
FEFWGQGTLVTVSS

SEQ ID NO: 4252 - protein, 12 aa, Homo sapiens
HWGQGTLVTVSS

SEQ ID NO: 4253 - protein, 12 aa, Homo sapiens
YWGRGTLVTVSS

SEQ ID NO: 4254 - protein, 14 aa, Homo sapiens
FDIWGQGTMVTVSS

SEQ ID NO: 4255 - protein, 18 aa, Homo sapiens
YYYGLDVWGIGTTVTVSS

SEQ ID NO: 4256 - protein, 15 aa, Homo sapiens
CFDPWGQGTQVIVSS

SEQ ID NO: 4257 - protein, 15 aa, Homo sapiens
NWFDPWGQGTLVIVS

SEQ ID NO: 4258 - protein, 15 aa, Homo sapiens
YFDYWVQGTLVTVSS

SEQ ID NO: 4259 - protein, 15 aa, Homo sapiens
NWFDPWGQGTLVIVS

SEQ ID NO: 4260 - protein, 14 aa, Homo sapiens
FDYWGQGTLVSVSS

SEQ ID NO: 4261 - protein, 11 aa, Homo sapiens
WGRGTLVTVSS

SEQ ID NO: 4262 - protein, 17 aa, Homo sapiens
YYYMDVWGKGTTVTVSS

SEQ ID NO: 4263 - protein, 13 aa, Homo sapiens
DYWGQGTWVTVSS

SEQ ID NO: 4264 - protein, 15 aa, Homo sapiens
YLDSWGQGTQVTVSS

SEQ ID NO: 4265 - protein, 16 aa, Homo sapiens
YGMDVWGQGTTVTVSS

SEQ ID NO: 4266 - protein, 14 aa, Homo sapiens
  MOD_RES (13)..(13): Any amino acid
YFDHWGQGTLLTXS

SEQ ID NO: 4267 - protein, 15 aa, Homo sapiens
YFDNWGQGTLVTVSS

SEQ ID NO: 4268 - protein, 16 aa, Homo sapiens
YTMDVWGQGTTVTVSS

SEQ ID NO: 4269 - protein, 18 aa, Homo sapiens
YYYGMDVWGRGTTVAVSS

SEQ ID NO: 4270 - protein, 14 aa, Homo sapiens
FDTWGQGTAVVVSS

SEQ ID NO: 4271 - protein, 12 aa, Homo sapiens
DYWGQGTLVTVS

SEQ ID NO: 4272 - protein, 14 aa, Homo sapiens
FDYWGQGTLVTVSS

SEQ ID NO: 4273 - protein, 15 aa, Homo sapiens
YFDLWGRGTLVTVSS

SEQ ID NO: 4274 - protein, 14 aa, Homo sapiens
FDSWGQGTLVTVSS

SEQ ID NO: 4275 - protein, 12 aa, Homo sapiens
FWGQGTLVTVSS

SEQ ID NO: 4276 - protein, 13 aa, Homo sapiens
DYWGQGTLVTVSS

SEQ ID NO: 4277 - protein, 14 aa, Homo sapiens
FDYWGQGTLVTVSS

SEQ ID NO: 4278 - protein, 13 aa, Homo sapiens
EYWGQGTLVTVSS

SEQ ID NO: 4279 - protein, 12 aa, Homo sapiens
YWGQGTLVTVSS

SEQ ID NO: 4280 - protein, 16 aa, Homo sapiens
DPFDIWGQGTMVTVSS

SEQ ID NO: 4281 - protein, 13 aa, Homo sapiens
DSWGPGTHVTVSS

SEQ ID NO: 4282 - protein, 14 aa, Homo sapiens
YFDSWGQGTLVTVS

SEQ ID NO: 4283 - protein, 15 aa, Homo sapiens
YLDSWGQGTLVTVSS

SEQ ID NO: 4284 - protein, 15 aa, Homo sapiens
WFDPWGQGTLVTVSS

SEQ ID NO: 4285 - protein, 15 aa, Homo sapiens
YFEYWGQGTLVAVSS

SEQ ID NO: 4286 - protein, 12 aa, Homo sapiens
YWGQGTLLTVSL

SEQ ID NO: 4287 - protein, 15 aa, Homo sapiens
YFDPWGQGTLVTVSS

SEQ ID NO: 4288 - protein, 15 aa, Homo sapiens
WFDPWGQGTLVTVSS

SEQ ID NO: 4289 - protein, 19 aa, Homo sapiens
CYYYYMDVWGKGTTVTVSS

SEQ ID NO: 4290 - protein, 14 aa, Homo sapiens
WLDPWGQGTLVTVS

SEQ ID NO: 4291 - protein, 16 aa, Homo sapiens
YGMDVWGHGTTVTVSS

SEQ ID NO: 4292 - protein, 11 aa, Homo sapiens
WGQGTLVTVSS

SEQ ID NO: 4293 - protein, 15 aa, Homo sapiens
YFDYWGQGTLVTVSS

SEQ ID NO: 4294 - protein, 12 aa, Homo sapiens
DYWGQGSLVPVS

SEQ ID NO: 4295 - protein, 13 aa, Homo sapiens
DYWGQGTLVTVSS

SEQ ID NO: 4296 - protein, 15 aa, Homo sapiens
AFDIWGQGTMVIISS

SEQ ID NO: 4297 - protein, 13 aa, Homo sapiens
DYWGQGTLVTVSS

SEQ ID NO: 4298 - protein, 14 aa, Homo sapiens
YFDVWGPGIPVTVS

SEQ ID NO: 4299 - protein, 18 aa, Homo sapiens
YYFFMDVWGKGTTVTVAS

SEQ ID NO: 4300 - protein, 14 aa, Homo sapiens
MDVWGKGTTVTVSS

SEQ ID NO: 4301 - protein, 13 aa, Homo sapiens
DYWGHGTLVTVSS

SEQ ID NO: 4302 - protein, 13 aa, Homo sapiens
DYWGQGTLVTVSS

SEQ ID NO: 4303 - protein, 15 aa, Homo sapiens
YFDYWGQGTPVTVSS

SEQ ID NO: 4304 - protein, 12 aa, Homo sapiens
PWGQGTLVTVSS

SEQ ID NO: 4305 - protein, 17 aa, Homo sapiens
YYHGMDVWGQGTTVIVS

SEQ ID NO: 4306 - protein, 14 aa, Homo sapiens
GMDVWGQGTTVIVS

SEQ ID NO: 4307 - protein, 15 aa, Homo sapiens
YFDFWGQGTLVTVSS

SEQ ID NO: 4308 - protein, 16 aa, Homo sapiens
YGMDVWGQGTTVTVSS

SEQ ID NO: 4309 - protein, 6 aa, Homo sapiens
AYWGQG

SEQ ID NO: 4310 - protein, 12 aa, Homo sapiens
YWGQGTLVTVSS

SEQ ID NO: 4311 - protein, 15 aa, Homo sapiens
YFDYWGQGTLVTVSS

SEQ ID NO: 4312 - protein, 14 aa, Homo sapiens
FDSWGQGTLVTVSS

SEQ ID NO: 4313 - protein, 13 aa, Homo sapiens
DYWGQGTLVTVSS

SEQ ID NO: 4314 - protein, 16 aa, Homo sapiens
FVMDVWGHGTTVTVSS

SEQ ID NO: 4315 - protein, 12 aa, Homo sapiens
DSWGQGTLVTVS

SEQ ID NO: 4316 - protein, 15 aa, Homo sapiens
AFDIWGQGTLVTVSS

SEQ ID NO: 4317 - protein, 15 aa, Homo sapiens
AFDIWGQGTMVTVSS

SEQ ID NO: 4318 - protein, 15 aa, Homo sapiens
YFDYWGQGSLVTVSS

SEQ ID NO: 4319 - protein, 15 aa, Homo sapiens
GMDVWGQGTTVIVSS

SEQ ID NO: 4320 - protein, 13 aa, Homo sapiens
DFWGQGTQVNVSS

SEQ ID NO: 4321 - protein, 14 aa, Homo sapiens
FDYWGQGTLVTVSS

SEQ ID NO: 4322 - protein, 16 aa, Homo sapiens
WYFDVWGRGTLVTVSS

SEQ ID NO: 4323 - protein, 11 aa, Homo sapiens
GMDLWGQGTTV

SEQ ID NO: 4324 - protein, 11 aa, Homo sapiens
GMDVWGLGTTV

SEQ ID NO: 4325 - protein, 17 aa, Homo sapiens
YHGMDVWGQGTTVTVSS

SEQ ID NO: 4326 - protein, 15 aa, Homo sapiens
YFESWGQGAPVTVSS

SEQ ID NO: 4327 - protein, 18 aa, Homo sapiens
SYYGMDVWGQGTTVTVSS

SEQ ID NO: 4328 - protein, 15 aa, Homo sapiens
YFDYWGQGTLVTVSS

SEQ ID NO: 4329 - protein, 13 aa, Homo sapiens
DYWGQGTLVTVSS

SEQ ID NO: 4330 - protein, 14 aa, Homo sapiens
FDIWGQGALVTVSS

SEQ ID NO: 4331 - protein, 15 aa, Homo sapiens
GLDVWGQGTTVTVSA

SEQ ID NO: 4332 - protein, 12 aa, Homo sapiens
FWGRGTLVTVSS

SEQ ID NO: 4333 - protein, 12 aa, Homo sapiens
HWGQGTLVTVSS

SEQ ID NO: 4334 - protein, 15 aa, Homo sapiens
WYFDLWGRGTQVTVS

SEQ ID NO: 4335 - protein, 15 aa, Homo sapiens
DAFDIWGQGTMVIVS

SEQ ID NO: 4336 - protein, 15 aa, Homo sapiens
WFGSWGQGTLVTVSS

SEQ ID NO: 4337 - protein, 18 aa, Homo sapiens
SYYAMDVWGQGTTVTVSS

SEQ ID NO: 4338 - protein, 17 aa, Homo sapiens
YWYFDLWGRGTLVTVSS

SEQ ID NO: 4339 - protein, 15 aa, Homo sapiens
YFEYWGQGTLVTVSS

SEQ ID NO: 4340 - protein, 16 aa, Homo sapiens
WYFDLWGRGTLVTVSS

SEQ ID NO: 4341 - protein, 11 aa, Homo sapiens
WGHGTLVTVSS

SEQ ID NO: 4342 - protein, 15 aa, Homo sapiens
YGVDIWGQGTTVTVS

SEQ ID NO: 4343 - protein, 18 aa, Homo sapiens
YYYGMDVWGQGTTVTVSS

SEQ ID NO: 4344 - protein, 9 aa, Homo sapiens
SWGQGTLVT

SEQ ID NO: 4345 - protein, 15 aa, Homo sapiens
YGMDVWGQGTTVTVS

SEQ ID NO: 4346 - protein, 14 aa, Homo sapiens
FDYWGQGTLVTVSS

SEQ ID NO: 4347 - protein, 14 aa, Homo sapiens
FDSWGQGTLVSVSS

SEQ ID NO: 4348 - protein, 12 aa, Homo sapiens
YWGQGTQVTVSS

SEQ ID NO: 4349 - protein, 17 aa, Homo sapiens
FYYAMDVWGQGTTVTVS

SEQ ID NO: 4350 - protein, 14 aa, Homo sapiens
FDLWGRGTLVTVSS

SEQ ID NO: 4351 - protein, 14 aa, Homo sapiens
FDLWGQGTMVTVSS

SEQ ID NO: 4352 - protein, 15 aa, Homo sapiens
YFDFWGQGTLVTVSS

SEQ ID NO: 4353 - protein, 19 aa, Homo sapiens
YYYYYSDVWGKGTTVTVSS

SEQ ID NO: 4354 - protein, 14 aa, Homo sapiens
FDTWGQGALVTVSS

SEQ ID NO: 4355 - protein, 15 aa, Homo sapiens
YFDLWGRGTLVTVSS

SEQ ID NO: 4356 - protein, 15 aa, Homo sapiens
YFDYWGQGTLVTVSS

SEQ ID NO: 4357 - protein, 15 aa, Homo sapiens
YFDYWGQGTLVTVSS

SEQ ID NO: 4358 - protein, 13 aa, Homo sapiens
DSWGQGTLVTVSS

SEQ ID NO: 4359 - protein, 18 aa, Homo sapiens
YYYGMDVWGQGTTVTVSS

SEQ ID NO: 4360 - protein, 15 aa, Homo sapiens
YFDYWGQGTLVTVSS

SEQ ID NO: 4361 - protein, 13 aa, Homo sapiens
FDPWGQGALVTVS

SEQ ID NO: 4362 - protein, 20 aa, Homo sapiens
FYYYYGMDVWGQGTTVTVSS

SEQ ID NO: 4363 - protein, 15 aa, Homo sapiens
YFDYWGQGTLVTVSS

SEQ ID NO: 4364 - protein, 16 aa, Homo sapiens
WYFDLWGRGTLVTVSS

SEQ ID NO: 4365 - protein, 10 aa, Homo sapiens
WGQGTLVTVS

SEQ ID NO: 4366 - protein, 14 aa, Homo sapiens
FDYWGQGTLVTVSS

SEQ ID NO: 4367 - protein, 15 aa, Homo sapiens
WFDPWGQGTLVTVSS

SEQ ID NO: 4368 - protein, 15 aa, Homo sapiens
YFDYWGQGTLVTVSS

SEQ ID NO: 4369 - protein, 15 aa, Homo sapiens
DMDVWGQGTTVIVSS

SEQ ID NO: 4370 - protein, 15 aa, Homo sapiens
WFDPWGQGTLVTVSS

SEQ ID NO: 4371 - protein, 20 aa, Homo sapiens
YYYYYYMDVWGKGTTVTVSS

SEQ ID NO: 4372 - protein, 17 aa, Homo sapiens
YWYFDLWGRGTLVTVSS

SEQ ID NO: 4373 - protein, 17 aa, Homo sapiens
  MOD_RES (6)..(6): Any amino acid
YYGMDXWGQGTTVTVSS

SEQ ID NO: 4374 - protein, 12 aa, Homo sapiens
YWGQGTLVTVSS

SEQ ID NO: 4375 - protein, 16 aa, Homo sapiens
NWFDPWGQGTLVTVSS

SEQ ID NO: 4376 - protein, 16 aa, Homo sapiens
YYMDVWGKGTTVTVSS

SEQ ID NO: 4377 - protein, 15 aa, Homo sapiens
WFDPWGQGTLVTVSS

SEQ ID NO: 4378 - protein, 16 aa, Homo sapiens
YGMDVWGQGTTVTVSS

SEQ ID NO: 4379 - protein, 16 aa, Homo sapiens
YYMDVWGKGTTVTVSS

SEQ ID NO: 4380 - protein, 13 aa, Homo sapiens
FDSWGRGTLVTVS

SEQ ID NO: 4381 - protein, 20 aa, Homo sapiens
YYYYYGMDVWGQGTTVTVSS

SEQ ID NO: 4382 - protein, 14 aa, Homo sapiens
FDPWGQGTLVTVSS

SEQ ID NO: 4383 - protein, 14 aa, Homo sapiens
MDVWGKGTTVTVSS

SEQ ID NO: 4384 - protein, 14 aa, Homo sapiens
FHYWGQGTLVTVSS

SEQ ID NO: 4385 - protein, 13 aa, Homo sapiens
DSWGQGTLVTVSS

SEQ ID NO: 4386 - protein, 15 aa, Homo sapiens
YFDYWGQGTLVTVSS

SEQ ID NO: 4387 - protein, 14 aa, Homo sapiens
FDYWGQGTLVTVSS

SEQ ID NO: 4388 - protein, 17 aa, Homo sapiens
AEYFQHWGQGTLVTVSS

SEQ ID NO: 4389 - protein, 19 aa, Homo sapiens
YYYYYMDVWGKGTTVTVSS

SEQ ID NO: 4390 - protein, 15 aa, Homo sapiens
AFDIWGQGTMVTVSS

SEQ ID NO: 4391 - protein, 17 aa, Homo sapiens
YYFMDVWGRGTTVTVSS

SEQ ID NO: 4392 - protein, 14 aa, Homo sapiens
FDYWGQGTLVTVSS

SEQ ID NO: 4393 - protein, 13 aa, Homo sapiens
DYWGQGTLVTVSS

SEQ ID NO: 4394 - protein, 14 aa, Homo sapiens
FDYWGQGTLVTVSS

SEQ ID NO: 4395 - protein, 16 aa, Homo sapiens
WYFDLWGRGTLVTVSS

SEQ ID NO: 4396 - protein, 14 aa, Homo sapiens
FDYWGQGTLVTVSS

SEQ ID NO: 4397 - protein, 15 aa, Homo sapiens
YLDVWGKGTTVTVSS

SEQ ID NO: 4398 - protein, 15 aa, Homo sapiens
YFDYWGQGTLVTVSS

SEQ ID NO: 4399 - protein, 17 aa, Homo sapiens
YYYMDVWGKGTTVTVSS

SEQ ID NO: 4400 - protein, 17 aa, Homo sapiens
YYYMDVWGKGTTVTVSS

SEQ ID NO: 4401 - protein, 15 aa, Homo sapiens
YFDYWGQGTLVTVSS

SEQ ID NO: 4402 - protein, 15 aa, Homo sapiens
WFDPWGQGTLVTVSS

SEQ ID NO: 4403 - protein, 15 aa, Homo sapiens
YFDYWGQGTLVTVSS

SEQ ID NO: 4404 - protein, 15 aa, Homo sapiens
WFDPWGQGTLVTVSS

SEQ ID NO: 4405 - protein, 15 aa, Homo sapiens
YFDYWGQGTLVTVSS

SEQ ID NO: 4406 - protein, 13 aa, Homo sapiens
DVWGQGTTVTVSS

SEQ ID NO: 4407 - protein, 19 aa, Homo sapiens
YYYYYMDVWGKGTTVTVSS

SEQ ID NO: 4408 - protein, 13 aa, Homo sapiens
DYWGQGTLVTVSS

SEQ ID NO: 4409 - protein, 14 aa, Homo sapiens
FDYWGQGTLVTVSS

SEQ ID NO: 4410 - protein, 14 aa, Homo sapiens
FDYWGQGTLVTVSS

SEQ ID NO: 4411 - protein, 14 aa, Homo sapiens
FGYWGQGTLVTVSS

SEQ ID NO: 4412 - protein, 14 aa, Homo sapiens
FDPWGQGTLVTVSS

SEQ ID NO: 4413 - protein, 15 aa, Homo sapiens
YFDYWGQGTLVTVSS

SEQ ID NO: 4414 - protein, 13 aa, Homo sapiens
DYWGQGTLVTVSS

SEQ ID NO: 4415 - protein, 16 aa, Homo sapiens
DYFDVWGQGTMVTVSS

SEQ ID NO: 4416 - protein, 18 aa, Homo sapiens
YYYYGMDVWGQGTTVTVS

SEQ ID NO: 4417 - protein, 15 aa, Homo sapiens
YFDYWGQGTLVTVSS

SEQ ID NO: 4418 - protein, 13 aa, Homo sapiens
FDYWGQGTLVTVS

SEQ ID NO: 4419 - protein, 17 aa, Homo sapiens
YYYMDVWGKGTTVTVSS

SEQ ID NO: 4420 - protein, 13 aa, Homo sapiens
DYWGQGTLVTVSS

SEQ ID NO: 4421 - protein, 15 aa, Homo sapiens
YFDYWGQGTLVTVSS

SEQ ID NO: 4422 - protein, 19 aa, Homo sapiens
YYYYYMDVWGKGTTVTVSS

SEQ ID NO: 4423 - protein, 14 aa, Homo sapiens
FDYWGQGTLVTVSS

SEQ ID NO: 4424 - protein, 15 aa, Homo sapiens
YFDYWGQGTLVTVSS

SEQ ID NO: 4425 - protein, 15 aa, Homo sapiens
WFDFWGQGTLVTVSS

SEQ ID NO: 4426 - protein, 13 aa, Homo sapiens
DYWGQGTLVTVSS

SEQ ID NO: 4427 - protein, 15 aa, Homo sapiens
YFDYWGQGTLVTVSS

SEQ ID NO: 4428 - protein, 14 aa, Homo sapiens
YFDYWGQGTLVTVS

SEQ ID NO: 4429 - protein, 11 aa, Homo sapiens
WGQGTLVTVSS

SEQ ID NO: 4430 - protein, 11 aa, Homo sapiens
WGKGTPVIVSS

SEQ ID NO: 4431 - protein, 11 aa, Homo sapiens
WGKGTTVTVSS

SEQ ID NO: 4432 - protein, 11 aa, Homo sapiens
WGQGTLVAVTS

SEQ ID NO: 4433 - protein, 11 aa, Homo sapiens
WGQGIRVTVSS

SEQ ID NO: 4434 - protein, 11 aa, Homo sapiens
WGQGTLVTVSS

SEQ ID NO: 4435 - protein, 11 aa, Homo sapiens
WGQGALVTVSS

SEQ ID NO: 4436 - protein, 11 aa, Homo sapiens
WGQGTLVTVSS

SEQ ID NO: 4437 - protein, 11 aa, Homo sapiens
WGQGTLVTVSS

SEQ ID NO: 4438 - protein, 9 aa, Homo sapiens
WGQGTMVTV

SEQ ID NO: 4439 - protein, 11 aa, Homo sapiens
WGKGTTVTVSS

SEQ ID NO: 4440 - protein, 11 aa, Homo sapiens
WGQGTLVTVSS

SEQ ID NO: 4441 - protein, 11 aa, Homo sapiens
WGHGTLVTVSS

SEQ ID NO: 4442 - protein, 11 aa, Homo sapiens
WGRGTLVTVSS

SEQ ID NO: 4443 - protein, 11 aa, Homo sapiens
WGQGSLVTVSS

SEQ ID NO: 4444 - protein, 11 aa, Homo sapiens
WGQGTLVTVSS

SEQ ID NO: 4445 - protein, 11 aa, Homo sapiens
WGQGSLVTVSS

SEQ ID NO: 4446 - protein, 11 aa, Homo sapiens
WGRGVLVTVSS

SEQ ID NO: 4447 - protein, 11 aa, Homo sapiens
WGKGTTVTVSS

SEQ ID NO: 4448 - protein, 11 aa, Homo sapiens
WGQGTMVTVSS

SEQ ID NO: 4449 - protein, 11 aa, Homo sapiens
WGRGALVTVSS

SEQ ID NO: 4450 - protein, 11 aa, Homo sapiens
WGRGTTVTVSS

SEQ ID NO: 4451 - protein, 11 aa, Homo sapiens
WGQGTLVTVSS

SEQ ID NO: 4452 - protein, 11 aa, Homo sapiens
WGQGTLVTVSS

SEQ ID NO: 4453 - protein, 9 aa, Homo sapiens
WGHGTLVTV

SEQ ID NO: 4454 - protein, 11 aa, Homo sapiens
WGQGTLVTVSS

SEQ ID NO: 4455 - protein, 11 aa, Homo sapiens
WGQGALVTVSS

SEQ ID NO: 4456 - protein, 11 aa, Homo sapiens
WGQGTLVTVSS

SEQ ID NO: 4457 - protein, 11 aa, Homo sapiens
WGQGTLVTVSS

SEQ ID NO: 4458 - protein, 11 aa, Homo sapiens
WGRGTLVTVSS

SEQ ID NO: 4459 - protein, 11 aa, Homo sapiens
WGQGTMVTVSS

SEQ ID NO: 4460 - protein, 11 aa, Homo sapiens
WGIGTTVTVSS

SEQ ID NO: 4461 - protein, 11 aa, Homo sapiens
WGQGTQVIVSS

SEQ ID NO: 4462 - protein, 10 aa, Homo sapiens
WGQGTLVIVS

SEQ ID NO: 4463 - protein, 11 aa, Homo sapiens
WVQGTLVTVSS

SEQ ID NO: 4464 - protein, 10 aa, Homo sapiens
WGQGTLVIVS

SEQ ID NO: 4465 - protein, 11 aa, Homo sapiens
WGQGTLVSVSS

SEQ ID NO: 4466 - protein, 11 aa, Homo sapiens
WGRGTLVTVSS

SEQ ID NO: 4467 - protein, 11 aa, Homo sapiens
WGKGTTVTVSS

SEQ ID NO: 4468 - protein, 11 aa, Homo sapiens
WGQGTWVTVSS

SEQ ID NO: 4469 - protein, 11 aa, Homo sapiens
WGQGTQVTVSS

SEQ ID NO: 4470 - protein, 11 aa, Homo sapiens
WGQGTTVTVSS

SEQ ID NO: 4471 - protein, 10 aa, Homo sapiens
  MOD_RES (9)..(9): Any amino acid
WGQGTLLTXS

SEQ ID NO: 4472 - protein, 11 aa, Homo sapiens
WGQGTLVTVSS

SEQ ID NO: 4473 - protein, 11 aa, Homo sapiens
WGQGTTVTVSS

SEQ ID NO: 4474 - protein, 11 aa, Homo sapiens
WGRGTTVAVSS

SEQ ID NO: 4475 - protein, 11 aa, Homo sapiens
WGQGTAVVVSS

SEQ ID NO: 4476 - protein, 10 aa, Homo sapiens
WGQGTLVTVS

SEQ ID NO: 4477 - protein, 11 aa, Homo sapiens
WGQGTLVTVSS

SEQ ID NO: 4478 - protein, 11 aa, Homo sapiens
WGRGTLVTVSS

SEQ ID NO: 4479 - protein, 11 aa, Homo sapiens
WGQGTLVTVSS

SEQ ID NO: 4480 - protein, 11 aa, Homo sapiens
WGQGTLVTVSS

SEQ ID NO: 4481 - protein, 11 aa, Homo sapiens
WGQGTLVTVSS

SEQ ID NO: 4482 - protein, 11 aa, Homo sapiens
WGQGTLVTVSS

SEQ ID NO: 4483 - protein, 11 aa, Homo sapiens
WGQGTLVTVSS

SEQ ID NO: 4484 - protein, 11 aa, Homo sapiens
WGQGTLVTVSS

SEQ ID NO: 4485 - protein, 11 aa, Homo sapiens
WGQGTMVTVSS

SEQ ID NO: 4486 - protein, 11 aa, Homo sapiens
WGPGTHVTVSS

SEQ ID NO: 4487 - protein, 10 aa, Homo sapiens
WGQGTLVTVS

SEQ ID NO: 4488 - protein, 11 aa, Homo sapiens
WGQGTLVTVSS

SEQ ID NO: 4489 - protein, 11 aa, Homo sapiens
WGQGTLVTVSS

SEQ ID NO: 4490 - protein, 11 aa, Homo sapiens
WGQGTLVAVSS

SEQ ID NO: 4491 - protein, 11 aa, Homo sapiens
WGQGTLLTVSL

SEQ ID NO: 4492 - protein, 11 aa, Homo sapiens
WGQGTLVTVSS

SEQ ID NO: 4493 - protein, 11 aa, Homo sapiens
WGQGTLVTVSS

SEQ ID NO: 4494 - protein, 11 aa, Homo sapiens
WGKGTTVTVSS

SEQ ID NO: 4495 - protein, 10 aa, Homo sapiens
WGQGTLVTVS

SEQ ID NO: 4496 - protein, 11 aa, Homo sapiens
WGHGTTVTVSS

SEQ ID NO: 4497 - protein, 11 aa, Homo sapiens
WGQGTLVTVSS

SEQ ID NO: 4498 - protein, 11 aa, Homo sapiens
WGQGTLVTVSS

SEQ ID NO: 4499 - protein, 10 aa, Homo sapiens
WGQGSLVPVS

SEQ ID NO: 4500 - protein, 11 aa, Homo sapiens
WGQGTLVTVSS

SEQ ID NO: 4501 - protein, 11 aa, Homo sapiens
WGQGTMVIISS

SEQ ID NO: 4502 - protein, 11 aa, Homo sapiens
WGQGTLVTVSS

SEQ ID NO: 4503 - protein, 10 aa, Homo sapiens
WGPGIPVTVS

SEQ ID NO: 4504 - protein, 11 aa, Homo sapiens
WGKGTTVTVAS

SEQ ID NO: 4505 - protein, 11 aa, Homo sapiens
WGKGTTVTVSS

SEQ ID NO: 4506 - protein, 11 aa, Homo sapiens
WGHGTLVTVSS

SEQ ID NO: 4507 - protein, 11 aa, Homo sapiens
WGQGTLVTVSS

SEQ ID NO: 4508 - protein, 11 aa, Homo sapiens
WGQGTPVTVSS

SEQ ID NO: 4509 - protein, 11 aa, Homo sapiens
WGQGTLVTVSS

SEQ ID NO: 4510 - protein, 10 aa, Homo sapiens
WGQGTTVIVS

SEQ ID NO: 4511 - protein, 10 aa, Homo sapiens
WGQGTTVIVS

SEQ ID NO: 4512 - protein, 11 aa, Homo sapiens
WGQGTLVTVSS

SEQ ID NO: 4513 - protein, 11 aa, Homo sapiens
WGQGTTVTVSS

SEQ ID NO: 4514 - protein, 4 aa, Homo sapiens
WGQG

SEQ ID NO: 4515 - protein, 11 aa, Homo sapiens
WGQGTLVTVSS

SEQ ID NO: 4516 - protein, 11 aa, Homo sapiens
WGQGTLVTVSS

SEQ ID NO: 4517 - protein, 11 aa, Homo sapiens
WGQGTLVTVSS

SEQ ID NO: 4518 - protein, 11 aa, Homo sapiens
WGQGTLVTVSS

SEQ ID NO: 4519 - protein, 11 aa, Homo sapiens
WGHGTTVTVSS

SEQ ID NO: 4520 - protein, 10 aa, Homo sapiens
WGQGTLVTVS

SEQ ID NO: 4521 - protein, 11 aa, Homo sapiens
WGQGTLVTVSS

SEQ ID NO: 4522 - protein, 11 aa, Homo sapiens
WGQGTMVTVSS

SEQ ID NO: 4523 - protein, 11 aa, Homo sapiens
WGQGSLVTVSS

SEQ ID NO: 4524 - protein, 11 aa, Homo sapiens
WGQGTTVIVSS

SEQ ID NO: 4525 - protein, 11 aa, Homo sapiens
WGQGTQVNVSS

SEQ ID NO: 4526 - protein, 11 aa, Homo sapiens
WGQGTLVTVSS

SEQ ID NO: 4527 - protein, 11 aa, Homo sapiens
WGRGTLVTVSS

SEQ ID NO: 4528 - protein, 7 aa, Homo sapiens
WGQGTTV

SEQ ID NO: 4529 - protein, 7 aa, Homo sapiens
WGLGTTV

SEQ ID NO: 4530 - protein, 11 aa, Homo sapiens
WGQGTTVTVSS

SEQ ID NO: 4531 - protein, 11 aa, Homo sapiens
WGQGAPVTVSS

SEQ ID NO: 4532 - protein, 11 aa, Homo sapiens
WGQGTTVTVSS

SEQ ID NO: 4533 - protein, 11 aa, Homo sapiens
WGQGTLVTVSS

SEQ ID NO: 4534 - protein, 11 aa, Homo sapiens
WGQGTLVTVSS

SEQ ID NO: 4535 - protein, 11 aa, Homo sapiens
WGQGALVTVSS

SEQ ID NO: 4536 - protein, 11 aa, Homo sapiens
WGQGTTVTVSA

SEQ ID NO: 4537 - protein, 11 aa, Homo sapiens
WGRGTLVTVSS

SEQ ID NO: 4538 - protein, 11 aa, Homo sapiens
WGQGTLVTVSS

SEQ ID NO: 4539 - protein, 10 aa, Homo sapiens
WGRGTQVTVS

SEQ ID NO: 4540 - protein, 10 aa, Homo sapiens
WGQGTMVIVS

SEQ ID NO: 4541 - protein, 11 aa, Homo sapiens
WGQGTLVTVSS

SEQ ID NO: 4542 - protein, 11 aa, Homo sapiens
WGQGTTVTVSS

SEQ ID NO: 4543 - protein, 11 aa, Homo sapiens
WGRGTLVTVSS

SEQ ID NO: 4544 - protein, 11 aa, Homo sapiens
WGQGTLVTVSS

SEQ ID NO: 4545 - protein, 11 aa, Homo sapiens
WGRGTLVTVSS

SEQ ID NO: 4546 - protein, 11 aa, Homo sapiens
WGHGTLVTVSS

SEQ ID NO: 4547 - protein, 10 aa, Homo sapiens
WGQGTTVTVS

SEQ ID NO: 4548 - protein, 11 aa, Homo sapiens
WGQGTTVTVSS

SEQ ID NO: 4549 - protein, 8 aa, Homo sapiens
WGQGTLVT

SEQ ID NO: 4550 - protein, 10 aa, Homo sapiens
WGQGTTVTVS

SEQ ID NO: 4551 - protein, 11 aa, Homo sapiens
WGQGTLVTVSS

SEQ ID NO: 4552 - protein, 11 aa, Homo sapiens
WGQGTLVSVSS

SEQ ID NO: 4553 - protein, 11 aa, Homo sapiens
WGQGTQVTVSS

SEQ ID NO: 4554 - protein, 10 aa, Homo sapiens
WGQGTTVTVS

SEQ ID NO: 4555 - protein, 11 aa, Homo sapiens
WGRGTLVTVSS

SEQ ID NO: 4556 - protein, 11 aa, Homo sapiens
WGQGTMVTVSS

SEQ ID NO: 4557 - protein, 11 aa, Homo sapiens
WGQGTLVTVSS

SEQ ID NO: 4558 - protein, 11 aa, Homo sapiens
WGKGTTVTVSS

SEQ ID NO: 4559 - protein, 11 aa, Homo sapiens
WGQGALVTVSS

SEQ ID NO: 4560 - protein, 11 aa, Homo sapiens
WGRGTLVTVSS

SEQ ID NO: 4561 - protein, 11 aa, Homo sapiens
WGQGTLVTVSS

SEQ ID NO: 4562 - protein, 11 aa, Homo sapiens
WGQGTLVTVSS

SEQ ID NO: 4563 - protein, 11 aa, Homo sapiens
WGQGTLVTVSS

SEQ ID NO: 4564 - protein, 11 aa, Homo sapiens
WGQGTTVTVSS

SEQ ID NO: 4565 - protein, 11 aa, Homo sapiens
WGQGTLVTVSS

SEQ ID NO: 4566 - protein, 10 aa, Homo sapiens
WGQGALVTVS

SEQ ID NO: 4567 - protein, 11 aa, Homo sapiens
WGQGTTVTVSS

SEQ ID NO: 4568 - protein, 11 aa, Homo sapiens
WGQGTLVTVSS

SEQ ID NO: 4569 - protein, 11 aa, Homo sapiens
WGRGTLVTVSS

SEQ ID NO: 4570 - protein, 10 aa, Homo sapiens
WGQGTLVTVS

SEQ ID NO: 4571 - protein, 11 aa, Homo sapiens
WGQGTLVTVSS

SEQ ID NO: 4572 - protein, 11 aa, Homo sapiens
WGQGTLVTVSS

SEQ ID NO: 4573 - protein, 11 aa, Homo sapiens
WGQGTLVTVSS

SEQ ID NO: 4574 - protein, 11 aa, Homo sapiens
WGQGTTVIVSS

SEQ ID NO: 4575 - protein, 11 aa, Homo sapiens
WGQGTLVTVSS

SEQ ID NO: 4576 - protein, 11 aa, Homo sapiens
WGKGTTVTVSS

SEQ ID NO: 4577 - protein, 11 aa, Homo sapiens
WGRGTLVTVSS

SEQ ID NO: 4578 - protein, 11 aa, Homo sapiens
WGQGTTVTVSS

SEQ ID NO: 4579 - protein, 11 aa, Homo sapiens
WGQGTLVTVSS

SEQ ID NO: 4580 - protein, 11 aa, Homo sapiens
LSQGTLVTVSS

SEQ ID NO: 4581 - protein, 11 aa, Homo sapiens
WGQGTLVTVSS

SEQ ID NO: 4582 - protein, 11 aa, Homo sapiens
WGKGTTVTVSS

SEQ ID NO: 4583 - protein, 11 aa, Homo sapiens
WGQGTLVTVSS

SEQ ID NO: 4584 - protein, 11 aa, Homo sapiens
WGQGTTVTVSS

SEQ ID NO: 4585 - protein, 11 aa, Homo sapiens
WGKGTTVTVSS

SEQ ID NO: 4586 - protein, 10 aa, Homo sapiens
WGRGTLVTVS

SEQ ID NO: 4587 - protein, 11 aa, Homo sapiens
WGQGTTVTVSS

SEQ ID NO: 4588 - protein, 11 aa, Homo sapiens
WGQGTLVTVSS

SEQ ID NO: 4589 - protein, 11 aa, Homo sapiens
WGKGTTVTVSS

SEQ ID NO: 4590 - protein, 11 aa, Homo sapiens
WGQGTLVTVSS

SEQ ID NO: 4591 - protein, 11 aa, Homo sapiens
WGQGTLVTVSS

SEQ ID NO: 4592 - protein, 11 aa, Homo sapiens
WGQGTLVTVSS

SEQ ID NO: 4593 - protein, 11 aa, Homo sapiens
WGQGTLVTVSS

SEQ ID NO: 4594 - protein, 11 aa, Homo sapiens
WGQGTLVTVSS

SEQ ID NO: 4595 - protein, 11 aa, Homo sapiens
WGKGTTVTVSS

SEQ ID NO: 4596 - protein, 11 aa, Homo sapiens
WGQGTMVTVSS

SEQ ID NO: 4597 - protein, 11 aa, Homo sapiens
WGRGTTVTVSS

SEQ ID NO: 4598 - protein, 11 aa, Homo sapiens
WGQGTLVTVSS

SEQ ID NO: 4599 - protein, 11 aa, Homo sapiens
WGQGTLVTVSS

SEQ ID NO: 4600 - protein, 11 aa, Homo sapiens
WGQGTLVTVSS

SEQ ID NO: 4601 - protein, 11 aa, Homo sapiens
WGRGTLVTVSS

SEQ ID NO: 4602 - protein, 11 aa, Homo sapiens
WGQGTLVTVSS

SEQ ID NO: 4603 - protein, 11 aa, Homo sapiens
WGKGTTVTVSS

SEQ ID NO: 4604 - protein, 11 aa, Homo sapiens
WGQGTLVTVSS

SEQ ID NO: 4605 - protein, 11 aa, Homo sapiens
WGKGTTVTVSS

SEQ ID NO: 4606 - protein, 11 aa, Homo sapiens
WGKGTTVTVSS

SEQ ID NO: 4607 - protein, 11 aa, Homo sapiens
WGQGTLVTVSS

SEQ ID NO: 4608 - protein, 11 aa, Homo sapiens
WGQGTLVTVSS

SEQ ID NO: 4609 - protein, 11 aa, Homo sapiens
WGQGTLVTVSS

SEQ ID NO: 4610 - protein, 11 aa, Homo sapiens
WGQGTLVTVSS

SEQ ID NO: 4611 - protein, 11 aa, Homo sapiens
WGQGTLVTVSS

SEQ ID NO: 4612 - protein, 11 aa, Homo sapiens
WGQGTTVTVSS

SEQ ID NO: 4613 - protein, 11 aa, Homo sapiens
WGKGTTVTVSS

SEQ ID NO: 4614 - protein, 11 aa, Homo sapiens
WGQGTLVTVSS

SEQ ID NO: 4615 - protein, 11 aa, Homo sapiens
WGQGTLVTVSS

SEQ ID NO: 4616 - protein, 11 aa, Homo sapiens
WGQGTLVTVSS

SEQ ID NO: 4617 - protein, 11 aa, Homo sapiens
WGQGTLVTVSS

SEQ ID NO: 4618 - protein, 11 aa, Homo sapiens
WGQGTLVTVSS

SEQ ID NO: 4619 - protein, 11 aa, Homo sapiens
WGQGTLVTVSS

SEQ ID NO: 4620 - protein, 11 aa, Homo sapiens
WGQGTLVTVSS

SEQ ID NO: 4621 - protein, 11 aa, Homo sapiens
WGQGTMVTVSS

SEQ ID NO: 4622 - protein, 10 aa, Homo sapiens
WGQGTTVTVS

SEQ ID NO: 4623 - protein, 11 aa, Homo sapiens
WGQGTLVTVSS

SEQ ID NO: 4624 - protein, 10 aa, Homo sapiens
WGQGTLVTVS

SEQ ID NO: 4625 - protein, 11 aa, Homo sapiens
WGKGTTVTVSS

SEQ ID NO: 4626 - protein, 11 aa, Homo sapiens
WGQGTLVTVSS

SEQ ID NO: 4627 - protein, 11 aa, Homo sapiens
WGQGTLVTVSS

SEQ ID NO: 4628 - protein, 11 aa, Homo sapiens
WGKGTTVTVSS

SEQ ID NO: 4629 - protein, 11 aa, Homo sapiens
WGQGTLVTVSS

SEQ ID NO: 4630 - protein, 11 aa, Homo sapiens
WGQGTLVTVSS

SEQ ID NO: 4631 - protein, 11 aa, Homo sapiens
WGQGTLVTVSS

SEQ ID NO: 4632 - protein, 11 aa, Homo sapiens
WGQGTLVTVSS

SEQ ID NO: 4633 - protein, 11 aa, Homo sapiens
WGQGTLVTVSS

SEQ ID NO: 4634 - protein, 10 aa, Homo sapiens
WGQGTLVTVS

SEQ ID NO: 4635 - protein, 15 aa, Homo sapiens
CARGMYYYESYLQHW

SEQ ID NO: 4636 - protein, 14 aa, Homo sapiens
CTVGDVVHYGLDVW

SEQ ID NO: 4637 - protein, 20 aa, Homo sapiens
CATRGTIGPFSYYYYYMDVW

SEQ ID NO: 4638 - protein, 16 aa, Homo sapiens
CAKGDSPNMEYAFDSW

SEQ ID NO: 4639 - protein, 18 aa, Homo sapiens
CARQRGYNYGAKMYFDFW

SEQ ID NO: 4640 - protein, 15 aa, Homo sapiens
CARALRGGLTCLDFW

SEQ ID NO: 4641 - protein, 22 aa, Homo sapiens
CVRGLNQRASIFGDVRYWFDPW

SEQ ID NO: 4642 - protein, 17 aa, Homo sapiens
CTRANIITAGSSTFDYW

SEQ ID NO: 4643 - protein, 18 aa, Homo sapiens
CARDITIFGVARWTFDSW

SEQ ID NO: 4644 - protein, 24 aa, Homo sapiens
CGKDIKWTYFDSSTYYDGDGFDFW

SEQ ID NO: 4645 - protein, 20 aa, Homo sapiens
CATRGTIGPFSYYYYYMDVW

SEQ ID NO: 4646 - protein, 20 aa, Homo sapiens
CARGPWFGMSLYAARSFDVW

SEQ ID NO: 4647 - protein, 12 aa, Homo sapiens
CARDFDRGAEHW

SEQ ID NO: 4648 - protein, 21 aa, Homo sapiens
CLREPREGGGGNAFYWYFDLW

SEQ ID NO: 4649 - protein, 24 aa, Homo sapiens
CARGLGNRITIYGVLVTRNWLDPW

SEQ ID NO: 4650 - protein, 20 aa, Homo sapiens
CARSDDCTNGVCYTRHFDYW

SEQ ID NO: 4651 - protein, 16 aa, Homo sapiens
CARHETSPGGDYFNHW

SEQ ID NO: 4652 - protein, 22 aa, Homo sapiens
CASLKHNDCFSFGCPHWYLDLW

SEQ ID NO: 4653 - protein, 31 aa, Homo sapiens; identical to SEQ ID NO: 4036

SEQ ID NO: 4654 - protein, 13 aa, Homo sapiens
CARDRGIDAFDIW

SEQ ID NO: 4655 - protein, 22 aa, Homo sapiens
CASLKHDDCYSTACPHWYFDLW

SEQ ID NO: 4656 - protein, 20 aa, Homo sapiens
CLTDQHDGCTSASCHKMDVW

SEQ ID NO: 4657 - protein, 18 aa, Homo sapiens
CARYVGNRGPTSYYFDYW

SEQ ID NO: 4658 - protein, 17 aa, Homo sapiens
CARVGMSDGYYYVFDSW

SEQ ID NO: 4659 - protein, 16 aa, Homo sapiens
CARAGDWDYNPHFASW

SEQ ID NO: 4660 - protein, 14 aa, Homo sapiens
CARIRRGTSGYDYW

SEQ ID NO: 4661 - protein, 16 aa, Homo sapiens
CATRGPVVLGEALAYW

SEQ ID NO: 4662 - protein, 18 aa, Homo sapiens
CTNGLTGPAYVNAEFEFW

SEQ ID NO: 4663 - protein, 24 aa, Homo sapiens
CVKVSGYASGWLAPFGPVGHLSHW

SEQ ID NO: 4664 - protein, 17 aa, Homo sapiens
CVGQGKTNWGWTGMPYW

SEQ ID NO: 4665 - protein, 11 aa, Homo sapiens
CVGGSRSFDIW

SEQ ID NO: 4666 - protein, 24 aa, Homo sapiens
CARQVFYDNDDSDGLGYYYGLDVW

SEQ ID NO: 4667 - protein, 22 aa, Homo sapiens
CARGLNQRSSIFGVVRHCFDPW

SEQ ID NO: 4668 - protein, 19 aa, Homo sapiens
CARGEGYAGVPTPNWFDPW

SEQ ID NO: 4669 - protein, 13 aa, Homo sapiens
CSRDVDGGYFDYW

SEQ ID NO: 4670 - protein, 19 aa, Homo sapiens
CARGEGYAGVPTPNWFDPW

SEQ ID NO: 4671 - protein, 19 aa, Homo sapiens
CAKDGPTSAHYVQWDFDYW

SEQ ID NO: 4672 - protein, 13 aa, Homo sapiens
CARGGVWFGSLRW

SEQ ID NO: 4673 - protein, 24 aa, Homo sapiens
CAKEYICSGGTCYSFRSYYYMDVW

SEQ ID NO: 4674 - protein, 12 aa, Homo sapiens
CARLRDAYSDYW

SEQ ID NO: 4675 - protein, 16 aa, Homo sapiens
CAKDGLRYFGFYLDSW

SEQ ID NO: 4676 - protein, 17 aa, Homo sapiens
CAKDSSPGYFFYGMDVW

SEQ ID NO: 4677 - protein, 17 aa, Homo sapiens
  MOD_RES (3)..(3): Any amino acid
CAXMGWLLVASYYFDHW

SEQ ID NO: 4678 - protein, 23 aa, Homo sapiens
CARVARICTNGACYEGAYYFDNW

SEQ ID NO: 4679 - protein, 25 aa, Homo sapiens
CVKDKGYSSGYDDVAGYYWYTMDVW

SEQ ID NO: 4680 - protein, 19 aa, Homo sapiens
CAKTRRITATRYYYGMDVW

SEQ ID NO: 4681 - protein, 18 aa, Homo sapiens
CVRRERPLRSGRAPFDTW

SEQ ID NO: 4682 - protein, 19 aa, Homo sapiens
CAKGSRYITIFGANPPDYW

SEQ ID NO: 4683 - protein, 20 aa, Homo sapiens
CARSRQRGYSSYDKGDFDYW

SEQ ID NO: 4684 - protein, 21 aa, Homo sapiens
CARDFHNTIFGVVIPRYFDLW

SEQ ID NO: 4685 - protein, 17 aa, Homo sapiens
CVKHSVGYAGSGSFDSW

SEQ ID NO: 4686 - protein, 15 aa, Homo sapiens
CAKDRSGYFYALHFW

SEQ ID NO: 4687 - protein, 16 aa, Homo sapiens
CARCPVATPGRGVDYW

SEQ ID NO: 4688 - protein, 17 aa, Homo sapiens
CVKHNLGYSGSGTFDYW

SEQ ID NO: 4689 - protein, 21 aa, Homo sapiens
AVYYCARGATYRSSSGYWEYW

SEQ ID NO: 4690 - protein, 16 aa, Homo sapiens
CAKDPSYGSGSYSQYW

SEQ ID NO: 4691 - protein, 16 aa, Homo sapiens
CARDRHDYGEDPFDIW

SEQ ID NO: 4692 - protein, 16 aa, Homo sapiens
CAKDGLRYFGFYLDSW

SEQ ID NO: 4693 - protein, 17 aa, Homo sapiens
CTREAGLWPEPYYFDSW

SEQ ID NO: 4694 - protein, 17 aa, Homo sapiens
CARQPGRDSSGYYLDSW

SEQ ID NO: 4695 - protein, 22 aa, Homo sapiens
CAKRSADCSSTSCSGGSWFDPW

SEQ ID NO: 4696 - protein, 15 aa, Homo sapiens
CARTIGIVTTYFEYW

SEQ ID NO: 4697 - protein, 18 aa, Homo sapiens
CARDRGDVLVAQGAIGYW

SEQ ID NO: 4698 - protein, 16 aa, Homo sapiens
CARLHYSTTWHYFDPW

SEQ ID NO: 4699 - protein, 18 aa, Homo sapiens
CARDSEATTTRGRWFDPW

SEQ ID NO: 4700 - protein, 20 aa, Homo sapiens
CAKAGDSGSSHCYYYYMDVW

SEQ ID NO: 4701 - protein, 22 aa, Homo sapiens
CAKNRNYRPSGDFAEGHWLDPW

SEQ ID NO: 4702 - protein, 17 aa, Homo sapiens
CTKVDSSPFFDYGMDVW

SEQ ID NO: 4703 - protein, 19 aa, Homo sapiens
CARDLLKPPNIDPTVKGLW

SEQ ID NO: 4704 - protein, 22 aa, Homo sapiens
CTRDIRGGYSYGYFVPYYFDYW

SEQ ID NO: 4705 - protein, 19 aa, Homo sapiens
CARMGFVGSFTSGTYIDYW

SEQ ID NO: 4706 - protein, 16 aa, Homo sapiens
CARIHDFRSGFPLDYW

SEQ ID NO: 4707 - protein, 23 aa, Homo sapiens
CARDDCSITTCRVPNQDHAFDIW

SEQ ID NO: 4708 - protein, 18 aa, Homo sapiens
CARAAWRDGNDGYFLDYW

SEQ ID NO: 4709 - protein, 14 aa, Homo sapiens
CAKRGDWLWYFDVW

SEQ ID NO: 4710 - protein, 24 aa, Homo sapiens
CARLVPAEPSGPGNYFYYFFMDVW

SEQ ID NO: 4711 - protein, 13 aa, Homo sapiens
CARGTTATGMDVW

SEQ ID NO: 4712 - protein, 14 aa, Homo sapiens
CARVGRRSWYVDYW

SEQ ID NO: 4713 - protein, 9 aa, Homo sapiens
CTRGDPDYW

SEQ ID NO: 4714 - protein, 19 aa, Homo sapiens
CARKVRGSSPDPLYYFDYW

SEQ ID NO: 4715 - protein, 15 aa, Homo sapiens
CTRNSPITVFGVGPW

SEQ ID NO: 4716 - protein, 16 aa, Homo sapiens
CARGLNYYYYHGMDVW

SEQ ID NO: 4717 - protein, 16 aa, Homo sapiens
CARGLNYYYYHGMDVW

SEQ ID NO: 4718 - protein, 18 aa, Homo sapiens
CAKLRRGVMLIKYYFDFW

SEQ ID NO: 4719 - protein, 16 aa, Homo sapiens
CARDAGRFLAYGMDVW

SEQ ID NO: 4720 - protein, 14 aa, Homo sapiens
CATGYGFVGPLAYW

SEQ ID NO: 4721 - protein, 11 aa, Homo sapiens
CYGGDTEVRYW

SEQ ID NO: 4722 - protein, 18 aa, Homo sapiens
CVRCFGYSSNTPAYFDYW

SEQ ID NO: 4723 - protein, 18 aa, Homo sapiens
CARDFRPYDLLTGLFDSW

SEQ ID NO: 4724 - protein, 14 aa, Homo sapiens
CATFSQGGLQNDYW

SEQ ID NO: 4725 - protein, 13 aa, Homo sapiens
CAIVSRSFVMDVW

SEQ ID NO: 4726 - protein, 18 aa, Homo sapiens
CAKTLRKRNGYSGPIDSW

SEQ ID NO: 4727 - protein, 17 aa, Homo sapiens
CARDDTGISKKNAFDIW

SEQ ID NO: 4728 - protein, 21 aa, Homo sapiens
CARDNLPSLYGDYDRNAFDIW

SEQ ID NO: 4729 - protein, 15 aa, Homo sapiens
CAKGRNYYVDYFDYW

SEQ ID NO: 4730 - protein, 16 aa, Homo sapiens
CARGLNYYYYHGMDVW

SEQ ID NO: 4731 - protein, 17 aa, Homo sapiens
CARDSRIVPTNYYYDFW

SEQ ID NO: 4732 - protein, 14 aa, Homo sapiens [sequence omitted]

SEQ ID NO: 4733 - protein, 20 aa, Homo sapiens
CARVRCGGLCYSSDWYFDVW

SEQ ID NO: 4734 - protein, 16 aa, Homo sapiens
CARGLNYYFYHGMDLW

SEQ ID NO: 4735 - protein, 16 aa, Homo sapiens
CAKGLNYYYYHGMDVW

SEQ ID NO: 4736 - protein, 22 aa, Homo sapiens
CAKDTATVTTSLYFYYHGMDVW

SEQ ID NO: 4737 - protein, 18 aa, Homo sapiens
CAKSQGPFYSDYVYFESW

SEQ ID NO: 4738 - protein, 20 aa, Homo sapiens
CAREGSYGDTYHSYYGMDVW

SEQ ID NO: 4739 - protein, 16 aa, Homo sapiens
CTADLSTSSGHYFDYW

SEQ ID NO: 4740 - protein, 14 aa, Homo sapiens
CARHSYALPPRDYW

SEQ ID NO: 4741 - protein, 15 aa, Homo sapiens
CARGGGWLQSDFDIW

SEQ ID NO: 4742 - protein, 22 aa, Homo sapiens
CASSSGWPSDRYFHHYSGLDVW

SEQ ID NO: 4743 - protein, 11 aa, Homo sapiens
CAGHTSTTNFW

SEQ ID NO: 4744 - protein, 15 aa, Homo sapiens
CARGDCTSTSCYVHW

SEQ ID NO: 4745 - protein, 22 aa, Homo sapiens
CVREGREYGDRFSVPNWYFDLW

SEQ ID NO: 4746 - protein, 20 aa, Homo sapiens
CARHPSYLAVADGRDAFDIW

SEQ ID NO: 4747 - protein, 21 aa, Homo sapiens
CARQPPITIFGLLRPGWFGSW

SEQ ID NO: 4748 - protein, 20 aa, Homo sapiens
CAREGSYGDTYHSYYAMDVW

SEQ ID NO: 4749 - protein, 22 aa, Homo sapiens
CAREGREYGDRFSVPYWYFDLW

SEQ ID NO: 4750 - protein, 15 aa, Homo sapiens
CARGVFSPAYYFEYW

SEQ ID NO: 4751 - protein, 15 aa, Homo sapiens
CAKIAVSGQWYFDLW

SEQ ID NO: 4752 - protein, 13 aa, Homo sapiens
CVVFITPTINYTW

SEQ ID NO: 4753 - protein, 21 aa, Homo sapiens
CARLGGTGLNGGDFQYGVDIW

SEQ ID NO: 4754 - protein, 24 aa, Homo sapiens
CSRLNPSRRPPPGVPHYYYGMDVW

SEQ ID NO: 4755 - protein, 18 aa, Homo sapiens
CTSCWPILNHYSPRPSSW

SEQ ID NO: 4756 - protein, 16 aa, Homo sapiens
CASALRYSFVYGMDVW

SEQ ID NO: 4757 - protein, 15 aa, Homo sapiens
CVKDAYNSGWHFDYW

SEQ ID NO: 4758 - protein, 11 aa, Homo sapiens
CTKQTGDFDSW

SEQ ID NO: 4759 - protein, 18 aa, Homo sapiens
CVSSYCRGNNCYGAPNYW

SEQ ID NO: 4760 - protein, 20 aa, Homo sapiens
CAREGSYGDTYHFYYAMDVW

SEQ ID NO: 4761 - protein, 10 aa, Homo sapiens
CVTQQSFDLW

SEQ ID NO: 4762 - protein, 14 aa, Homo sapiens
CAKILPGIYAFDLW

SEQ ID NO: 4763 - protein, 18 aa, Homo sapiens
CARTGGYSFDYSDYFDFW

SEQ ID NO: 4764 - protein, 16 aa, Homo sapiens
CAIPPVPYYYYYSDVW

SEQ ID NO: 4765 - protein, 21 aa, Homo sapiens
CARQRRVSIFGLLLPGEFDTW

SEQ ID NO: 4766 - protein, 23 aa, Homo sapiens
CARHNDHYCSSTSCYPVGYFDLW

SEQ ID NO: 4767 - protein, 22 aa, Homo sapiens
CARALYYYDSSGFPVLYYFDYW

SEQ ID NO: 4768 - protein, 16 aa, Homo sapiens
CARLPRGDTLYYFDYW

SEQ ID NO: 4769 - protein, 15 aa, Homo sapiens
CAKGANWGSWFLDSW

SEQ ID NO: 4770 - protein, 23 aa, Homo sapiens
CAGRRGYDFWSGYYNYYYGMDVW

SEQ ID NO: 4771 - protein, 20 aa, Homo sapiens
CAKEGWAYCGGDCYSYFDYW

SEQ ID NO: 4772 - protein, 19 aa, Homo sapiens
CARGKRGGNPDFSQRFDPW

SEQ ID NO: 4773 - protein, 24 aa, Homo sapiens
CARGGHTAMVTTPYFYYYYGMDVW

SEQ ID NO: 4774 - protein, 20 aa, Homo sapiens
CARAPDDFWSGYWGYYFDYW

SEQ ID NO: 4775 - protein, 20 aa, Homo sapiens
CANSEWELLGPSTWWYFDLW

SEQ ID NO: 4776 - protein, 12 aa, Homo sapiens
CAREEGGSYFDW

SEQ ID NO: 4777 - protein, 20 aa, Homo sapiens
CGRHAVTTWYNWNYHPFDYW

SEQ ID NO: 4778 - protein, 18 aa, Homo sapiens
CARHPVNYGDYVEWFDPW

SEQ ID NO: 4779 - protein, 15 aa, Homo sapiens
CARDSEGSGWYFDYW

SEQ ID NO: 4780 - protein, 22 aa, Homo sapiens
CAKVGWSLQWLNLGYSNDMDVW

SEQ ID NO: 4781 - protein, 22 aa, Homo sapiens
CARSHTSGSYLWRDLPYWFDPW

SEQ ID NO: 4782 - protein, 27 aa, Homo sapiens
CAREGHRHSSRWRDTGYYYYYYYMDVW

SEQ ID NO: 4783 - protein, 20 aa, Homo sapiens
CARDSNEAARGSEYWYFDLW

SEQ ID NO: 4784 - protein, 22 aa, Homo sapiens
  MOD_RES (21)..(21): Any amino acid
CARQDYYDSSGYSTEYYGMDXW

SEQ ID NO: 4785 - protein, 21 aa, Homo sapiens
CAKDQSGFVLMVYAIHSPGYW

SEQ ID NO: 4786 - protein, 8 aa, Homo sapiens
CAKDGGDL

SEQ ID NO: 4787 - protein, 18 aa, Homo sapiens
CAREGSSSWEFYNWFDPW

SEQ ID NO: 4788 - protein, 15 aa, Homo sapiens
CAKLMVDLDYYMDVW

SEQ ID NO: 4789 - protein, 19 aa, Homo sapiens
CARDPTPYSNAQLCWFDPW

SEQ ID NO: 4790 - protein, 17 aa, Homo sapiens
CAKDPLRYSSLYGMDVW

SEQ ID NO: 4791 - protein, 20 aa, Homo sapiens
CARGQDYDILTRSSYYMDVW

SEQ ID NO: 4792 - protein, 17 aa, Homo sapiens
CARESHDYSNYRFFDSW

SEQ ID NO: 4793 - protein, 26 aa, Homo sapiens
CASPLGYCSSTSCYRTYYYYYGMDVW

SEQ ID NO: 4794 - protein, 19 aa, Homo sapiens
CARLTVPSIRSWSSRFDPW

SEQ ID NO: 4795 - protein, 10 aa, Homo sapiens
CARDLSMDVW

SEQ ID NO: 4796 - protein, 13 aa, Homo sapiens
CSQGDGTVGFHYW

SEQ ID NO: 4797 - protein, 14 aa, Homo sapiens
CARIHYGDYFVDSW

SEQ ID NO: 4798 - protein, 11 aa, Homo sapiens
CTTGTTYFDYW

SEQ ID NO: 4799 - protein, 20 aa, Homo sapiens
CARHAVTTWYNWNYHPFDYW

SEQ ID NO: 4800 - protein, 16 aa, Homo sapiens
CARDGGDEFAEYFQHW

SEQ ID NO: 4801 - protein, 21 aa, Homo sapiens
CASQVGLRVVISYYYYYMDVW

SEQ ID NO: 4802 - protein, 18 aa, Homo sapiens
CARHPVEYSSLAGAFDIW

SEQ ID NO: 4803 - protein, 19 aa, Homo sapiens
CARQGAGDLPYKYYFMDVW

SEQ ID NO: 4804 - protein, 17 aa, Homo sapiens
CARHPVEYSSSSGFDYW

SEQ ID NO: 4805 - protein, 18 aa, Homo sapiens
CASLYYDFWSGYFGGDYW

SEQ ID NO: 4806 - protein, 19 aa, Homo sapiens
CARSTPYNWNSPSPAFDYW

SEQ ID NO: 4807 - protein, 13 aa, Homo sapiens
CARDRENWYFDLW

SEQ ID NO: 4808 - protein, 17 aa, Homo sapiens
CARDGDSSGWYARFDYW

SEQ ID NO: 4809 - protein, 16 aa, Homo sapiens
CARGLRDPLSWYLDVW

SEQ ID NO: 4810 - protein, 19 aa, Homo sapiens
CARDPDQLFVQDPYYFDYW

SEQ ID NO: 4811 - protein, 23 aa, Homo sapiens
CARGSLDDFWSGWIEDYYYMDVW

SEQ ID NO: 4812 - protein, 23 aa, Homo sapiens
CARGSLDDFWSGWIEDYYYMDVW

SEQ ID NO: 4813 - protein, 19 aa, Homo sapiens
CARDPDQLFVQDPYYFDYW

SEQ ID NO: 4814 - protein, 19 aa, Homo sapiens
CAKDPTPYSGRYFTWFDPW

SEQ ID NO: 4815 - protein, 19 aa, Homo sapiens
CARDPGGFGVVAPYYFDYW

SEQ ID NO: 4816 - protein, 18 aa, Homo sapiens
CARHPVNYGDYVEWFDPW

SEQ ID NO: 4817 - protein, 15 aa, Homo sapiens
CARDSEGSGWYFDYW

SEQ ID NO: 4818 - protein, 24 aa, Homo sapiens
CARVGTERITIFGVVISAAAMDVW

SEQ ID NO: 4819 - protein, 21 aa, Homo sapiens
CARSVYDTKPMTYYYYYMDVW

SEQ ID NO: 4820 - protein, 18 aa, Homo sapiens
CARGVLLWFGENENNDYW

SEQ ID NO: 4821 - protein, 20 aa, Homo sapiens
CARRGGACGSGGSCLPFDYW

SEQ ID NO: 4822 - protein, 17 aa, Homo sapiens
CARHGVEYSTSSCFDYW

SEQ ID NO: 4823 - protein, 15 aa, Homo sapiens
CARGRSGSSWDFGYW

SEQ ID NO: 4824 - protein, 19 aa, Homo sapiens
CARGKRGGNPDFSQRFDPW

SEQ ID NO: 4825 - protein, 19 aa, Homo sapiens
CARDPDQLFVQDPYYFDYW

SEQ ID NO: 4826 - protein, 11 aa, Homo sapiens
CARQRSEHDYW

SEQ ID NO: 4827 - protein, 16 aa, Homo sapiens
CARPSREGYLDYFDVW

SEQ ID NO: 4828 - protein, 24 aa, Homo sapiens
CATSTLNIVATIGPHYYYYGMDVW

SEQ ID NO: 4829 - protein, 19 aa, Homo sapiens
CARDPDQLFVQDPYYFDYW

SEQ ID NO: 4830 - protein, 16 aa, Homo sapiens
CARHLRGDFVGQFDYW

SEQ ID NO: 4831 - protein, 23 aa, Homo sapiens
CARGSLDDFWSGWIEDYYYMDVW

SEQ ID NO: 4832 - protein, 20 aa, Homo sapiens
CAGKTYDFWSGYPIKVVDYW

SEQ ID NO: 4833 - protein, 20 aa, Homo sapiens
CARAPDDFWSGYWGYYFDYW

SEQ ID NO: 4834 - protein, 21 aa, Homo sapiens
CARLKGGWELLIYYYYYMDVW

SEQ ID NO: 4835 - protein, 17 aa, Homo sapiens
CARRGEGYSSSSSFDYW

SEQ ID NO: 4836 - protein, 15 aa, Homo sapiens
CAKDSEGYEYYFDYW

SEQ ID NO: 4837 - protein, 15 aa, Homo sapiens
CGRVAGGTYSWFDFW

SEQ ID NO: 4838 - protein, 19 aa, Homo sapiens
CASLRVDTAMVTWGDQDYW

SEQ ID NO: 4839 - protein, 19 aa, Homo sapiens
CARDPDQLFVQDPYYFDYW

SEQ ID NO: 4840 - protein, 28 aa, Homo sapiens
CARIGVKGGSYDFWSGYYPNPGGYFDYW

SEQ ID NO: 4841 - DNA, 360 bp, Homo sapiens
aggtgcagctggtgcagtctggggctgaggtgaagaagcctgggtcctcggtgaaggtctcctgcaagacttctggaggcaccttcagcagctatgccatcagttgggtgcgacaggcccctggacaagggcttgagtggatgggagggatcatcggtatgtttggtacaacaaactacgcacagaagttccagggcagagtcacgattaccgcggacgaaatctcgagcacagcctacatggagctgagcagcctgagatctgaggacacggccgtctattattgtgcgagagggatgtattactatgagtcatacctccaacactggggccagggcaccctggtcaccgtctcctcag

SEQ ID NO: 4842 - DNA, 258 bp, Homo sapiens
atcagctgggtgcgacaggcccctggacaaggacttcagtggatgggagggatcatccccagctttgccacaacaaaatatgcacaaaagtttcgggagagagtcataattaccgcggacgaatctacgaccactgcctacatggagctgggcggcctgacatctgacgacacggccgtgtatcactgcacagtgggtgatgttgttcactacggtctggacgtctggggcaaagggaccccggtcatcgtctcctca

SEQ ID NO: 4843 - DNA, 316 bp, Homo sapiens
cctcacctgcgctgtctctggtgcctccatcagaaactactactggagctggatccggcagcccccagggaagggactggagtggattgggtctatctattacagtgggaatatctactacaacccctccctcaagagtcgtgtcaccttatcaatagacacgtccaagagccaggtctccctgaggctgagctctgtgaccgctgcggacacggccatgtattactgtgcgacgaggggaacaatcggtcctttttcttactactactactacatggacgtctggggcaaggggaccacggtcaccgtctcctca

SEQ ID NO: 4844 - DNA, 272 bp, Homo sapiens
  modified_base (110)..(110): a, c, t, g, unknown or other
ttatgccatgcactgggtccggcaagttccagggaagggcctggaatgggtctcaggtattagttggaatagcaattttctagattacgcggactctgtgaagggccggntcaccatctccagagacgacgccaagaactccctgtatctggaaatgaacagcctgagacttgaggacacggccttctattactgtgcaaaaggagactctcctaatatggaatacgcctttgactcctggggccagggaaccctggtcgccgtcacctcag

SEQ ID NO: 4845 - DNA, 349 bp, Homo sapiens
  modified_base (2)..(5): a, c, t, g, unknown or other
  modified_base (7)..(8): a, c, t, g, unknown or other
gnnnnannctgggaggtccctgagactctcctgtgaagcctctggattcatcttcagtagcttcgctatgcactgggtccgccaggctccaggcaaggggctggagtgggtggcactgatatcgtttgatggaggtcggacattctccgcagactccgtgaagggccgattcaccatctccagagacaattccaagaacacggtgtttctgcacatgaacagtctgagacctgcggacacggctgtgtatttctgtgcgagacaacgtggatacaactatggtgcgaagatgtactttgacttctggggccagggaatccgggtcaccgtctcctcagcctccaccaag

SEQ ID NO: 4846 - DNA, 311 bp, Homo sapiens
cctgagactctcctgtgcagcgtctggattcaccctcagtagttacggcatgcactgggtccgccaggctccaggcaaggggctggagtgggtggcacttatatggtttgatggaagtaataaatactatacagattccgtgaagggccgattcatcatctccagagaccattccaagaacacattgtatctgcaaatgaacagcctgagagccgaggacacggctgtgtatcactgtgcgagagcgctccgtggtggtctcacttgtcttgacttttggggccagggaaccttggtcaccgtctcctcag

SEQ ID NO: 4847 - DNA, 261 bp, Homo sapiens
  modified_base (6)..(6): a, c, t, g, unknown or other
  modified_base (26)..(26): a, c, t, g, unknown or other
  modified_base (28)..(29): a, c, t, g, unknown or other
  modified_base (66)..(66): a, c, t, g, unknown or other
ccccangggagggactggagtggatngnngaaatcaatcaaagtggaagcaccacctataacccgnccctcaagagtcgcgtcaccttatcagtggacacgtccaagaaccagttctccctgaggttgacctctgtgaccgccgcggacacggctgtgtactactgtgtgagaggcctcaatcaacgtgcttccatttttggagacgtccggtactggttcgacccctggggccagggagccctggtcaccgtctcctcag

SEQ ID NO: 4848 - DNA, 315 bp, Homo sapiens
tctcctgtgcagccactgggttcaccttcagtggctcttctattcactgggtccgccaggctcccgggaaagggctggagtgggttggccgtattcgaagcaaatacaacgatctcgcgacagcatacactgagtcggtgaaaggcaggttcaccatctccagagatgattcaaagaacacggcgtatctgcaaatgaacagcctgagaattgaggactcggccgtatattactgtactagagcaaatataatcacagctggttcgtccacctttgactactggggccagggaaccctggtcaccgtctcctcag

SEQ ID NO: 4849 - DNA, 318 bp, Homo sapiens
tgagactgtcctgtgtagcctctggattcgccttcaatacgtatgctatgcactgggtccgccaggctccaggcaaggggctggagtgggtggcacttatgtcattttatggaaccacgacatacgaagcggactccgtgaagggccgattcaccatctccagagacaattccaagaacacgctgtatttacaaatgaacagcctgcgaccagaagacacggctgtgtatttctgtgccagagatattacgatttttggagtggccaggtggacgtttgattcttggggccagggaaccctggtcaccgtctcctcag

SEQ ID NO: 4850 - DNA, 333 bp, Homo sapiens
cctgagactgtcctgcgcagcctctcgattcaacttcaataactatgccatgcactgggtccgccaggctccaggcaaggggctggagtgggtggcagttgtttcagctgatggaacttatacaaactatggagactccatgaagggccgagtcaccgtctccagagacaatctcaagaaaacgatgtatcttcagatcaatagcctcagacctgaggacacggctatgtactattgtgggaaagatatcaagtggacttattttgatagtagtacttattatgacggtgatggtttcgacttctggggacaagggacaatggtcaccgtctc

SEQ ID NO: 4851 - DNA, 316 bp, Homo sapiens
cctcacctgcactgtctctggtgcctccatcagaagttactactggagctggatccggcagcccccagggaagggactggagtggattgggtctatctattacagtgggaatatcaactacaacccctccctcaagagtcgtgtcaccttatcagtagacacgtccaagagccagttctccctgaagctgaactctgtgaccgctgcggacacggccatgtattactgtgcgacgaggggaacaatcggtcctttttcctactactactactacatggacgtctggggcaaagggaccacggtcaccgtctcctca

SEQ ID NO: 4852 - DNA, 301 bp, Homo sapiens
ggatacagcgtcaccagctattggatcggctgggtgcgccagatgcccgggaagggcctggagtggatgggggtcatccatcctggtaactccgaatccagatacagcccgtccttccaaggccaggtcaccatgtcagccgacaagtccattaataccgcctacctggagtggagcagcctgaaggcctcggacaccgccatgtattactgtgcgaggggaccatggttcgggatgtctttatacgccgcccgcagttttgatgtgtggggccaagggacactggtcaccgtctcctcag

SEQ ID NO: 4853 - DNA, 352 bp, Homo sapiens
gaggtgcagctggtggagtctgggggaggctgggtccagccgggggggtccctgagactctcctgtgaagcctctgggttcacctttagtttgtattggatgggctgggtccgccaggctccagggaaggggctggagtgggtggccaccatgaaccaagatggaagtgataattattatgtggactctgtgaagggccgattcaccatctccagagacaacgccaagaactcactgtatctgcagatgaacagcctgagagccgaggacacggctgtctattattgtgcgagagatttcgaccgtggtgcagagcactggggccacggaaccctggtcaccgtctcctcag

SEQ ID NO: 4854 - DNA, 379 bp, Homo sapiens
caggtgcagctggtggagtctgggggaggcgtggtccggcctggggggtccctgagactctcctgtgaagcgtctggattcaccctcaataactatggcatgcactgggtccgccaggctccaggcagggggctggagtgggtggcagttatgtgggccggtggaagaaataggttctatgcagactccgtgaagggccgattcaccatctccagagacgattccaaaaacaccctgtctctgcaaatgcacagcctgagagccgaggacacgggggtctattactgtttgagagagccccgagagggtggcggtggtaatgccttctactggtacttcgatctctggggccgtggcaccctggtcaccgtctcctcag

SEQ ID NO: 4855 - DNA, 387 bp, Homo sapiens
aggtgcagctggtgcagtctggggctgaggtgaagaagcctggggcctcagtgaaggtctcctgcaaggcctctggatacaccttcagaaattttgatatcaactgggtgcgacaggcccctggacaagggcttgagtggatgggatggatgaacccgaacaatggtgacacaggctatgcagagaaattccggggcagagtctccatgaccagggacacctccagaaacacagccttcatggagctgcgcggcctgacatctgaggacacggccatatattactgtgcgagaggcttggggaaccgcattacgatttatggagtgcttgttaccagaaactggctcgacccctggggccagggatccctggtcaccgtctcctcag

SEQ ID NO: 4856 - DNA, 321 bp, Homo sapiens
agatctcctgtaaggtttctggatacagctttaccagctactggatcggctgggtgcgccagatgcccggaaaaggcctggagtggatggggatcatctatcctgatgactcagataccaaatacagcccgaccttccaaggccaggtcaccatctcagccgacaagtccatcagcaccgcctacctgcagtggagcagcctgaaggcctcggacaccgccatgtattactgtgcgagaagcgatgattgtactaatggtgtatgctatacccggcactttgactactggggccagggaaccctggtcaccgtctcctcag

SEQ ID NO: 4857 - DNA, 320 bp, Homo sapiens
gaccctgtccctcacctgtgctgtctctggtggctccatcagcagaggtggatttacctggagttggattcggcagccaccagggaaggccctggagtggattgggtacatctatcagagtggaagtacctactacagcccgtcgctcaagagtcgagtcaacatctcgttggacaagtctaataatcgcttcttcctgaatgtgatgtctgtgaccgccgcggacacggccgtctattactgtgccagacatgagacctccccggggggagactactttaaccactggggccagggaagcctggtcaccgtctcctcag

SEQ ID NO: 4858 - DNA, 382 bp, Homo sapiens
gaggtgcagctggtggagtctgggggaggcttggtccagccgggggggtccctaagactcgcctgtacagcctctggatccatttttactattccttggatgggctgggtccgccaggctccagggaaggggctggagtgggtggccaacataaaccaagatggaagtgacacaacgtttctgggccctgtgaagggccgattcaccatctccagagacaacaccaagaactcagtgtttctgcaaatgaacgtcctgagagacgaggactcggctatctactactgtgcgagcctgaagcacaacgattgttttagtttcggctgtccacactggtacctcgatctctggggccgtggcgtcctggtcaccgtctcctcag

SEQ ID NO: 4859 - DNA, 281 bp, Homo sapiens
ggaaggggctggagtggattggggaaatcaatcatagtggaagcaccaactacaacccgtccctcaagagtcgagtcaccatatcagtagacacgtccaagaaccagttctccctgaagctgagctctgtgaccgccgcggacacggctgtgtattactgtgcgagcagccctattgtagtagtaccagctgccccacgagaattatactactcccctgggggctactactactactacatggacgtctggggcaaagggaccacggtcaccgtctcctca

SEQ ID NO: 4860 - DNA, 355 bp, Homo sapiens
gaggtgcagctggtggagtctggggggggcgtggtccagcctggggggtccctgagactctcctgtgcagcctctggattcacctttaataactattggatgagttgggtccgccagactccagggaaggggctggagtgggtggccaatataaagcaagatggaagtgagaaatactatgtggactctgtgaagggccgattcaccatgtccagggacaacgccaacaactcattgtatctgcaaatgagcaacctgagagccgaagacacggctatatattactgtgcgagagatcggggtattgatgcttttgatatctggggccaagggacaatggtcaccgtctcttcag

SEQ ID NO: 4861 - DNA, 382 bp, Homo sapiens
gaggtgcagctggtggagtctgggggaggcttggtccagccgggggggtccctgagactcgcctgtacagcctctggatccatcttcaatattccttggatgagctgggtccgccaaggtccagggaaggggctggagtgggtggccaacataaatcaagatggaagtgacacaacctttttgggctctgtggagggccgattcaccatctccagagacaacgccaggaactcagtgtttctgcaaatgagcgtcctgagagtcgaggacacggctacctactactgtgcgagcctcaagcacgacgattgttatagtaccgcctgtccacactggtacttcgatctctggggccgtggcgccctggtcaccgtctcctcag

SEQ ID NO: 4862 - DNA, 335 bp, Homo sapiens
  modified_base (9)..(9): a, c, t, g, unknown or other
ctggggggnccctgagactctcctgttcagcctctggattcatctttagtcactatgccatgaactgggcccgccaggctccagggaaggggctggagtgggtctcaggtgtgagtactagtggtgatagaacagtctacgcagactccgtgaagggccggttcaccatctccagagacaattccaagaacacgctgtatctgcaaatgaacagcctgagagtcgaggacacggccctttattactgcctgacagatcaacatgacgggtgtaccagtgccagctgccataaaatggacgtctggggcagagggactacggtcaccgtctcctca

SEQ ID NO: 4863 - DNA, 320 bp, Homo sapiens
cctgagactctcctgtgcggcctctggattcactttcagagacttctacatgagctggatccgccaggttccagggaagggactggagtgggtttcatacattagtggtagtggtaatgccaaataccacgcagactctgtgaggggccgcttcaccatctcccgggacaacgccaaggactcattgtttctgcaaatgaacaacctgagagtcgacgacacggccgtctattattgtgcgagatatgtggggaatcgaggaccaacctcctactactttgactactggggccagggaaccctggtcaccgtctcctcag

SEQ ID NO: 4864 - DNA, 266 bp, Homo sapiens
ctggagctgggtccgacagcccccagggaagggacttgagtggcttggatatctctattacagtgggaccaccagctacaacccctccctcaagagtcgagtcaccatgtcagcagacacgtccaagaggcagttgtccctgaggttgacctctgtgacctctgcggacacggccgtgtattactgtgcgagagtcggaatgagtgatggttattactacgtctttgactcttggggccagggaaccctggtcaccgtctcctcag

SEQ ID NO: 4865 - DNA, 306 bp, Homo sapiens
  modified_base (51)..(51): a, c, t, g, unknown or other
  modified_base (63)..(63): a, c, t, g, unknown or other
gagactctcctgtgcaacctccggattcacgtttagtggctattggatganctgggtccgccnggctccagggaaggggctggagtgggtggccactataaagcgagatggaagtgcaaagtactacgtggactctgcgaagggccgattcaccatctcccgagacaacaccaagaactccgtggatctgcacatgagaagcctgacagtcgaggacacggccctgtattactgtgcgagagcaggcgattgggactataatccccactttgcctcctggggccacggaaccctggtcaccgtctc

SEQ ID NO: 4866 - DNA, 304 bp, Homo sapiens
aaggtttcttgcacggcatctggatacaccttcaacatgcactatatccactgggtgcgacaggcccctggacaaggccttgagtggatgggattcatcgaccctagtggtgacagcagaagttactcacagaaatttcagggcagagtcaccttgaccagtgacacgtccacgagcacagtctacatggaactgaggaccctgagatctgacgacacggccgtgttttactgcgcgaggataaggcggggaactagcggttatgactactggggccagggaaccctggtcaccgtctcctcag

SEQ ID NO: 4867 - DNA, 308 bp, Homo sapiens
aggtttcctgcaaggcttctggatacaccttcactacctattctatgaattgggtgcgacaggcccctggacaaggacttgagtggatgggatggatcaacacctacactgggaacccaacctatgcccaggccttcacaggacggtttgtcttctccttggacacctctgtcagtacggcgtttctgcagatcaccagcctcaaggctgacgacactgccatatattactgtgcgacacggggacccgtggtcctaggtgaagcccttgcctactggggccagggagccctggtcaccgtctcctca

SEQ ID NO: 4868 - DNA, 320 bp, Homo sapiens
cctgacactctcctgtgtaggctctggattcatcttcagtaactatgccatacactgggtccgccaggctccaggcaaggggctggactgggtgtcaggtgtaacagatgatgaatcttataaatcgtatgcaaactccgtgaagggccgatacaccatctccagagacaattccaggaacacggtgtatctgcacatggacagcctgagacctgaggacacggctatttattactgtactaatggtctaacaggaccagcctatgtcaatgcagagtttgaattctggggccagggaaccctggtcaccgtttcctcag

SEQ ID NO: 4869 - DNA, 338 bp, Homo sapiens
cctgagactctcctgtgaagcctctggattcacctttagcaactctgccatgagctgggtccgccaggctccagggaaggggctggagtgggtctcaagtattagtggtggtggtcatagcacatactacgcagactccgtgaagggccggttcagcatctccagagacaattccaagaacacgctgtatctgcaactgaacagcctgagagccgaagacacggccatattttactgtgtgaaagtctctgggtatgccagtggctggttggcccctttcgggccagtaggacacttgagccactggggccagggaaccctggtcaccgtctcctcag

SEQ ID NO: 4870 - DNA, 253 bp, Homo sapiens
  modified_base (10)..(10): a, c, t, g, unknown or other
  modified_base (12)..(13): a, c, t, g, unknown or other
cgccagcccncnnggaagggcctggagtggcttgcctacatccattacagtgggagcacctcctacagcccgtccctcaagagccgaattaccatgtcagtagacacgtccaagagtcagttctccctgaagttgaactcagtgactgccgcagacacggccgtgtattattgtgtcggccaaggaaaaactaactggggatggacgggaatgccctactggggccggggaaccctggtcaccgtctcctcag

SEQ ID NO: 4871 - DNA, 297 bp, Homo sapiens
tgagactctcctgtgcagcctctggattctcctttagtacttattggatgaactgggtccgccagattccagggaaggggctggagtgggtggccaacataaagcaagatggaagtgagaagtactatgtggactctgtgaagggccgattcaccatctccagagacaacgccaagaattcactgtatctgcaaatgaacagcctgagagtcgaggacacggctgtattttactgtgtcggtggttcacggtcttttgatatctggggccaagggacaatggtcaccgtctcttcag

SEQ ID NO: 4872 - DNA, 390 bp, Homo sapiens
caggtgcagctgcaggagtcgggcccaggcctggtgaagccttcggagaccctgtccctcatctgttctgtctctggtggctccgtcaccagtggcatttaccactggacctggattcgacagcccccagggaagggactggagtggattggatatatccattacagtgggagcacgttctacaacccctccctcaagagtcgcgtcaccatatcactgaacgcggccaagaatcacttctccctgaggctgagctctgtgaccgctgcggacacggccgtttattactgtgcgagacaagttttttatgacaacgatgactccgacgggttggggtactactacggtctggacgtctggggcatagggaccacggtcaccgtctcctca

SEQ ID NO: 4873 - DNA, 312 bp, Homo sapiens
ctgtctctggtgagtcgttaagcggctacttctggaactggattcgccagtccccagggaagggcctggagtggattggggagattagtcagagtagagtcaccacctacaacccgtccctcgggggtcgagtgtacttctcagtagacacgtccaagaaccagttctccctgaacctgaattctgtgaccgccgcggacacggctgtgtactactgtgcgagaggcctcaatcaacgttcctcgatttttggagtcgtccgccactgtttcgacccctggggccagggaacccaggtcatcgtctcctcag

SEQ ID NO: 4874 - DNA, 323 bp, Homo sapiens
ctcggtgagggtctcctgcaaggactctgaagacaccttcagcacctatgttatgcactgggtgcgacaggcccctggacaagggcttgagtggatgggagaactcgttcctgtttatggtacaccgaactatgcacaggccttccaggacagaatcaccattagcgcggacgagtccacgaacacggcctatttggaactgagcagcctcacatctgaagacacggccgtatattactgtgcgagaggggagggctatgccggtgttccgacacccaactggttcgacccctggggccagggaaccctggtcatcgtctcct

SEQ ID NO: 4875 - DNA, 355 bp, Homo sapiens
gaggtgcagctggtggagtctgggggaggcttggtccggcctggggggtccctgagactctcctgtgcaccctctggattcacctttagtcactattgggtggcctggctccgccaggctccagaaaaggggctggagtggctggcccaaataaaccaagatggacgagagaagcactatgtggactctgtgaggggccgattcaccatctccagagacaacgccaagaactcactgtatctgcaaatgaacagcctgagagtcgaggacacggctctgtattactgttcgagagacgtggatgggggatattttgactactgggtccagggaactctggtcaccgtctcctcag

SEQ ID NO: 4876 - DNA, 323 bp, Homo sapiens
ctcggtgagggtctcctgcaagacttctgaagacaccttcagcacctatgttatgcactgggtgcgacaggcccctggacaagggcttgagtggatgggagaactcgttcctatttatgggacaccaaactatgcacaggccttccacgacagaatcaccattaccgcggacgagtccacgagcacggcctatttggaaatgaccagcctcacatctgaagacacggccgtatattactgtgcgagaggggagggctatgccggtgttccgacacccaactggttcgacccctggggccagggaaccctggtcatcgtctcct

SEQ ID NO: 4877 - DNA, 323 bp, Homo sapiens
cctgagactctcctgtgcagcgtctggattcaccttcagtagttatggcatgcactgggtccgccaggctccaggcaaggggctggagtgggtgtcacttatatggtttgatggaggtactaaatactacgcagactccgtgaagggccgattcaccatctccagagacaactccaagaacacgctgtatctgcaaatgaacagcctgagagccgaggacacggctgtctattactgtgcgaaagatggtccgacctccgcccactacgtacagtgggactttgactactggggccagggaaccctggtcagcgtctcatcag

SEQ ID NO: 4878 - DNA, 302 bp, Homo sapiens
cctcacctgcactgtgtctggtgcctccatcaccaatgctgattcttggtggaattggatccgccagtccccagggaagggcctggagtggattggctacatctattacagtggcaacacctactacaatccgtccctcaggagtcgggccagcatttcagtagacacgtccaagaacgagttcttcctgagtctgacttctgtgactgccgcagacacggccgtgtattactgtgccagagggggggtatggttcgggtccctcaggtggggccggggcaccctggtcaccgtctcctcag

SEQ ID NO: 4879 - DNA, 317 bp, Homo sapiens
cctctggattcagcttcagtaactatggcatgcactgggtccgccaggctccaggcaaggggctggagtgggtggcagttatatcacatgatggaagtaatgaagactatgcagactccgtcaagggccgattcaccatctcccgagacaattccaagaacaacctatatctgcaaatgaacaggctgagagctgaggacacggctgtatattactgtgcgaaagagtacatttgtagtggtggtacctgctactcgtttcgttcctactactacatggacgtctggggcaaagggaccacggtcaccgtctcctca

SEQ ID NO: 4880 - DNA, 286 bp, Homo sapiens
aaggcttctggatacaccttcaccggctattatgtacactgggtgcgacaggcccctggacaagggcttgagtggatgggatggatcaaccctaacagtggtggcacaaactatgcacagaggtttcagggcagggtcaccatgaccagggacacgtccttcagcacagtctacatggaggtgaacaggctgagatctgacgacacggccgtttactactgtgcgaggttaagagatgcctacagtgactattggggccagggaacctgggtcaccgtctcctcag

SEQ ID NO: 4881 - DNA, 314 bp, Homo sapiens
cctgagactctcctgttcagcctcaggattcacctttgacgattctgccattcactgggtccggcaacctccagggaagggcctggagtgggtctcaagtattagttggaatagtgataccatatactatgcggactctgtgaagggccggttcaccatctccagagacaacaccaagaactccctgtatctgcaaatgaccagtctgacaagtgaggacacggccctgtatttctgtgcaaaggacggactgcgatattttgggttttaccttgactcctggggccagggaacccaggtcaccgtctcctcag

SEQ ID NO: 4882 - DNA, 316 bp, Homo sapiens
cctgagactctcatgtgcagcctctggattcacctttgagcattatgccatgcactgggtccgtcaagctccagggaagggtctggagtgggtctctcttatcactggggatggttctgacacgttctactcagactctgtgaagggccgattcaccatctccagagacaacaacaaaaactccctctatctgcaaatgtacagtctgtcatctgaggacaccgccctgtatttctgtgcaaaagattctagtccgggctacttcttttacggtatggacgtctggggccaagggaccacggtcaccgtctcctca

SEQ ID NO: 4883 - DNA, 241 bp, Homo sapiens
  modified_base (17)..(18): a, c, t, g, unknown or other
  modified_base (53)..(53): a, c, t, g, unknown or other
  modified_base (57)..(57): a, c, t, g, unknown or other
  modified_base (84)..(84): a, c, t, g, unknown or other
  modified_base (89)..(91): a, c, t, g, unknown or other
  modified_base (99)..(99): a, c, t, g, unknown or other
  modified_base (104)..(104): a, c, t, g, unknown or other
  modified_base (107)..(107): a, c, t, g, unknown or other
  modified_base (111)..(111): a, c, t, g, unknown or other
  modified_base (130)..(130): a, c, t, g, unknown or other
  modified_base (141)..(141): a, c, t, g, unknown or other
  modified_base (147)..(147): a, c, t, g, unknown or other
  modified_base (151)..(151): a, c, t, g, unknown or other
  modified_base (167)..(167): a, c, t, g, unknown or other
  modified_base (169)..(169): a, c, t, g, unknown or other
  modified_base (215)..(215): a, c, t, g, unknown or other
  modified_base (235)..(235): a, c, t, g, unknown or other
ggaaggggctggagtgnntttcatacattagtagccgtggtgatacgatatantacncagactctgtgaagggccgattcaccntctcnnnagacaacncccanaantcantgtatctgcaaatgaacancctgcaagccnaggacncggntgtttattactgtgcnanaatggggtggcttttagtggcctcctactactttgaccactggggncagggaaccctgctcaccgnctcctc

SEQ ID NO: 4884 - DNA, 331 bp, Homo sapiens
agactctcctgtgcagcctctggactcatcttcagtaactactacatgagctggatccgccaggctccagggaaggggctggagggtgtttcctacattagtggcagtgctactatcatatactacgcagactctgtgaagggccgattcaccatctcccgggacaacccccggaactcactgtatctgcaaatgaacagcctgagagccgaggacacggccgtgtactactgtgcgagagtagcccgaatttgtactaatggtgcatgctatgagggggcatactactttgacaactggggccagggaaccctggtcaccgtctcctcag

SEQ ID NO: 4885 - DNA, 340 bp, Homo sapiens
cctgagactctcctgtgcagcctctggattcacctttgatgattatgccatgcactgggtccggcaagctccagggaagggcctggagtgggtctcaggtattagttggaatagtggtagcagagtctatgcggactctgtgaagggccgattcaccatctccagagacaacgccaagacctccctgtatctgcaaatgaacagtctgagacctgaggacacggccttgtattactgtgtaaaagataaaggatacagttctgggtacgatgatgtcgccggctactactggtacactatggacgtctggggccaagggaccacggtcaccgtctcctca

SEQ ID NO: 4886 - DNA, 319 bp, Homo sapiens
  modified_base (11)..(11): a, c, t, g, unknown or other
gagactctccngtgcagcctctggattcaccttcagagtctatggcttccactgggtccgccaggctccaggcaaggggctggagtgggtggcagctatatcatctgatggaagtaataaatactatgcagactccgtgaagggccgattcgtcatctccagagacaattccgagaacaccctttatctgcaaatggacagcctgagacctgaggacacggctgtatattactgtgcgaaaactagacgtataactgcaaccaggtattactacggtatggacgtctggggccgagggaccacggtcgccgtctcctca

SEQ ID NO: 4887 - DNA, 298 bp, Homo sapiens
tacaccttcaccacctactggctcggctgggtgcgccagatgcccggggaaggcctggagtggatggggatcatctatcctggtgactctcataccagatatagcccgtcattccaagggcaagtcaccctctctgccgacacgtccaccaacaccgcctacctgcactggttcagcctgaaggcctcggacaccgccatttactactgtgtgagacgtgagaggcccctccgttcagggagggctccttttgacacctggggccaagggacagcagtcgtcgtctcttcagcctcca

SEQ ID NO: 4888 - DNA, 231 bp, Homo sapiens
tgggtggcagtaatatcatctgatggaagtaataaatactatgccgactccgtgaagggccgattcaccatctccagagacaattccaagaacacgctgtatctgcaaatgaacagcctgagatctgaggacacggctgtgtattcctgtgcgaaggggtcccgctatataacgatttttggagccaaccccccggactactggggccagggaaccctggtcaccgtctcc

SEQ ID NO: 4889 - DNA, 276 bp, Homo sapiens
tactgtggctggatccgccagccccccgggaagggactggagtgggttggaagtatcgattacactgggaacacctactacaacccgtccctcaagagtcgagtcaccatatccgaagacacgtccaagaatcagttctccctgaagatgacctctgtgaccgccgcagacacggctgtttactactgtgcgaggtcgcgacaacgtggatatagttcctacgacaagggggactttgactactggggccagggaaccctggtcaccgtctcctca

SEQ ID NO: 4890 - DNA, 217 bp, Homo sapiens
ggtagtaccatatactacgcagactctgtgaagggccgattcaccatctccagagacaacgccaagaaatcagtgtacctggaaatgaacagcctgagagccgaggacacggctgtttattactgtgcgagagacttccataatacgatttttggagtggtcatcccgaggtacttcgatctctggggccgtggcaccctggtcactgtctcctcag

SEQ ID NO: 4891 - DNA, 317 bp, Homo sapiens
cctgagactctcctgtgcagcctctggattcacctttaatgattatgccatgcactgggtccggcaagctccacggaagggcctggagtgggtctcaactgttaattggaatagtggtgacatcggctatgcggactctgtgaagggccgattcaccatctccagagacaacgccaagaagtccctgtttctgcaaatgaacagtctgagacctgaggacacggccttctattattgtgtaaaacatagcgttggctacgctggttcggggagttttgactcctggggccagggaaccctggtcaccgtctcctcag

SEQ ID NO: 4892 - DNA, 309 bp, Homo sapiens
  modified_base (16)..(16): a, c, t, g, unknown or other
tgagactctcctgtgnagcctctggattcatctttgatgattatgccatgtactgggtccggcaagctccagggaagggcctggagtgggtcgcaggtatcaattggaaaagtaataacctaggctatgcggactctgtgaagggccgattcaccatctccagagacagcgccaagaagtccctttatctgcaaatgaacagtctgagaagtgaggatacggccacttattactgtgcaaaagatcggagtggttatttctacgctttacacttctggggccagggaaccctggtcaccgtctcctcag

SEQ ID NO: 4893 - DNA, 324 bp, Homo sapiens
gctggggggtcctgagactctcctgtgcagcctctggattcatcttcactagctattggatgcactgggtccgccaagctccagggaaggggctggtgtgggtctcacgtattaagagtgatgggagggacataagctacgcggactccgtgaagggccgattcaccgtctccagagacaacgccaagaatacggtgtatctgcaaatgaacagtctgagagccgaggacacggctgtctattactgtgcaagatgtcccgtagcaacacctggtagaggggttgactattggggccagggcaccctggtcaccgtctcctcag

SEQ ID NO: 4894 - DNA, 317 bp, Homo sapiens
cctgagactctcctgtgcagcctctggattcagttttgaggaatatggcatgcactgggtccggcaagctccagggaagggcccggagtgggtctcatttattaattggaacagtggtgacatagggtatgcggactctgtggaggggaggttcaccatctccagagacaacgccaagaactccttgtttctgcaaatgaacagtctgagaactgaggacacggccttgtattattgtgtaaaacataacctaggctattctggttcggggacttttgactactggggccagggaaccctggtcaccgtctcctcag

SEQ ID NO: 4895 - DNA, 291 bp, Homo sapiens
gcagctttgctatcagctgggtgcgacaggcccctggacaagggcttgaatggatgggaggcatcaccgctatgtttggcacagcgttctacgcacagaggttccaggatagactcaccattaccgcggacaaacccacggacaaattcatgagcacagtttccatggagctgaggagcctgacatctgaggacacggccgtctattactgtgcgagaggcgccacttacagaagctcgtcgggttattgggagtactggggccagggaaccctggtcaccgtctcctcag

SEQ ID NO: 4896 - DNA, 314 bp, Homo sapiens
cctgagactctcctgtgcagcctctggattcagcttcagtagctatggcatgcactgggtccgccaggctccaggcaaggggctggagcctgtggcaattatagcctatgatggaagtaataagtactatgcagactccgtgaggggccggttcaccgtctccagagacaattccaagaacacgctgtatctgcaaatgaacagcctgagaactgaagacacggctgtgtattactgtgcgaaagatccttcttatggctcggggagttattcgcagtactggggccagggaaccctggtcaccgtctcctcag

SEQ ID NO: 4897 - DNA, 312 bp, Homo sapiens
  modified_base (12)..(12): a, c, t, g, unknown or other
  modified_base (14)..(14): a, c, t, g, unknown or other
  modified_base (182)..(182): a, c, t, g, unknown or other
ccctcacctgcncngtctctggtgactccatcagcagtggtggctactactggaactggatccgccagtccccagggaagggccttgagtggattgggtacatctatttcactgggaagaccaactacaacccgtccctcaagagtcgagttaccatatcagtggatccgtctaagacgcanttctcgctgaagctgacctctgtgacggccgcggacacggccgtctattactgtgcgagagatcgtcatgactatggtgaagatccttttgatatctggggccaagggacaatggtcaccgtctcttcag

SEQ ID NO: 4898 - DNA, 314 bp, Homo sapiens
cctgagactctcctgttcagcctctggattcacctttgacgatgctgccatgcactgggtccggcatcgtccagggaagggcctggagtgggtctcaagtattagttggaatagcgataccatacactatgcggactctgtgaagggccggttcaccatctccagagacaacgccaagaattccgtgtatctgcaaatgagcaggctgacaagtgaggacacggccctgtatttctgtgcaaaagacggactgcgttattttgggttttatcttgactcctggggcccgggaacccacgtcaccgtctcctcag

SEQ ID NO: 4899 - DNA, 313 bp, Homo sapiens
  modified_base (50)..(50): a, c, t, g, unknown or other
cctgagactctcctgtgttgcctctggcttcacttttagtaaatatggcntagactgggtccgccaggctccagggaaggggctggagtgggtctcaggaattagtgctagcggtggtcgcacatactacgcagactccgtgaagggccgcttcaccatctccagagacaattccagagacaccttctttctgcaaatgaacagcctgagaaacgacgacacggccatttattattgtacgagagaagcggggctatggcccgagccgtactactttgactcctggggccagggaaccctggtcaccgtctcc

SEQ ID NO: 4900 - DNA, 314 bp, Homo sapiens
cctcacctgcactgtctctggtggctccatcagtggtggtaattactactggacctggatccggcagcccgccgggaagggactggagtggattgggcgtatctatcccagtgggagcaccaactacaacccctccctcaagagtcgagtcaccatatcagtagacacgtccaagaaccacttctccctaaatttgagctctgtgaccgccgcagacacggccgtctattactgtgcgagacaacccggtcgcgatagtagtggttattaccttgactcctggggccagggaaccctggtcaccgtctcctcag

SEQ ID NO: 4901 - DNA, 330 bp, Homo sapiens
tgagactctcctgtgcagcgtctggattcactttcagtagcgatggcatgcactgggtccgccaggctccaggcaaggggctggagtgggtggcttttatacggtatgatggaagtaagaaatactatgctgactccgtgaagggccgattcaccatctccagagacaattccaagagctcgctgtatctgcaaatgaacagcctgagaactgacgacacggctgtgtattattgtgcgaaacgttcggcagactgcagcagtaccagctgctcgggaggcagttggttcgacccctggggccagggcactctggtcaccgtctcctcag

SEQ ID NO: 4902 - DNA, 310 bp, Homo sapiens
cctgagactctcctgtgcagcctctggattcacattcagtgactactacatgagttggatccgccaggctcctgggaaggggccggagtggatttcatccattagtagcagttctactaccaaatcctacgcagactctgtgaagggccgattcaccatctccagggacaacgcccagaactcattgtttctccatatgaacagcctgagggccgacgacgcggctgtatatttctgtgcgcgaaccatcgggatagtgacgacctactttgaatactggggccagggaaccctggtcgccgtctcctca

SEQ ID NO: 4903 - DNA, 352 bp, Homo sapiens
  modified_base (2)..(3): a, c, t, g, unknown or other
  modified_base (6)..(6): a, c, t, g, unknown or other
tnnctngagctcagtgaggtttcctgcaagacatctggatacaccttcaccagatactttatacattgggtgcgacaggcccctggacaggggcttgagtggatgggaatgatcaaccctcgtaatcctcgtggtggtagtacaagttacgcacagaacttacagggcagagtcaccttgaccagcgacacgtccacgagtacagtctacttggagctgagcagcctgaaatctgaggacacggccgtatatcactgtgcgagagatcgaggggatgttcttgtagctcagggagccatcgggtactggggccagggaaccctgctcaccgtctccttagcctccaccaagg

SEQ ID NO: 4904 - DNA, 343 bp, Homo sapiens
  modified_base (4)..(4): a, c, t, g, unknown or other
  modified_base (11)..(12): a, c, t, g, unknown or other
  modified_base (64)..(64): a, c, t, g, unknown or other
cgcngagcttnngaccctgtccctcacgtgcaatgtctctggaggctccatcaccaccggtagntattactgggcctggatccggcagcccgccgggaagggtctggagtgggttgggcgcattttcattactgggagcaccgactacaacccctccctcaagagtcgagtcaccatatcattagacacgtcgaagaaccagttctccctgaagctgacctctgtgaccgccgcagacacggccgtgtatttctgtgcgagattacactatagcaccacctggcactatttcgacccctggggccagggaaccctggtcaccgtctcctcagcatccccgacc

SEQ ID NO: 4905 - DNA, 340 bp, Homo sapiens
  modified_base (2)..(2): a, c, t, g, unknown or other
gngcggggggtctgagactctcctgtgtagcctctggattcaccttcagtagttatgacatgaattgggtccgccaggctccagggaaggggctggagtggatttcatacattagtggtagtggtaatatcatatactacgcagactctgtgaagggccgattcaccatctccagagacaatgccaagaactcactatatctacagatgaacagcgtgagagacgacgacacggctctatattactgtgcgagagattcggaagctacaacgacacgggggaggtggttcgacccctggggccagggaaccctggtcaccgtctcctcagcatccccgac

SEQ ID NO: 4906 - DNA, 325 bp, Homo sapiens
cctgagactctcctgtgcagcgtctggtttcaccttcagtagttatggcatgcactgggtccgccaggctccaggcaaggggctggagtgggtggcatttgtacggtatgatggaagtaatatatgctatgcagcctccgtgaagggccgattcaccatctccagagacaattccaagaacacggtatatctgcaaatgaacagcctgagagctgacgacacggctgtgtattactgcgcgaaggcgggggatagtgggagctcacactgctactactactacatggatgtctggggcaaagggaccacggtcaccgtctcctca

SEQ ID NO: 4907 - DNA, 322 bp, Homo sapiens
agactctcctgtgcagcctctggattcacctttagcacctatgccatgtcctgggtccgccaggctccagggaaggggctggagtgggtctcaactatcactggtaacggtaggacattctacgcggactccgtgaagggccacttcaccatctccagagacaattccaaaaacatgctctatctacaaatgaacagcctgagagccgaggacacggccgtgtattattgtgcgaaaaatagaaattatcgtccttcgggggactttgcggaggggcactggctcgacccctggggccagggaacgctggtcaccgtctcct

SEQ ID NO: 4908 - DNA, 314 bp, Homo sapiens
tgagactctcctgtgcagcctctgggttcgcctttagcaattatgtcatggcctgggtccgccaggctccagggaaggggctggagtgggtctcaaatattgttgggagtggtgatagcacatactacgcagactccgtgaagggccggttcagtatctccagagacaattccaacaatacgctgactctgcaaatgcacagcctgagagccgaggacacggccatctattactgtacgaaggtcgatagcagtccctttttcgactatggtatggacgtctggggccacgggaccacggtcaccgtctcctca

SEQ ID NO: 4909 - DNA, 323 bp, Homo sapiens
cctgagactctcctgtgcagcctctggattcacttttagtcgttattggatgagctgggtccgccagactccagggaaagggttggagtgggtggccaacatagacgaagatggaagagacaaatattatgtggactctgtgaagggccgattcagcatctccagagacaacgccaagaactcattacatttgcaaatgagtaacctgagagccgaggacacggctgtatattactgtgcgagagatctccttaaacccccaaatatcgaccctacagtaaaaggtttgtggggccagggaaccctggtcaccgtctcttcag

SEQ ID NO: 4910 - DNA, 337 bp, Homo sapiens
cctgagactctcctgtacagcctctggattcacctttggtgattatgctttgagctgggtccgccaggctccagggaaggggctggagtgggtaggtttcattagaagcaaagcttatggtgggacaacagaatacgccgcgtctgtgaaaggcagattcaccatctcaagagatgattccaaaagcatcgcctatctgcaaatgaacagcctgaaaaccgaggacacagccgtgtattattgtactagagatatccggggcggatacagttatggttactttgttccttactactttgactactggggccagggaaccctggtcaccgtctcctca

SEQ ID NO: 4911 - DNA, 315 bp, Homo sapiens
cctcacctgcactgtctccagttactccatcaccagtggttactactggggctgggtccggcagcccccagggaaggggctggagtggattgcaagtatctatcatagtgggagcacctactacaacatgtccctcaagagtcgagtcaccatatcagtagacacgtccaagaaccagttctccctgaagctgacctctgtgaccgccgcagacacggccgtttactactgtgcgagaatgggattcgttggttcctttacttcggggacttatatcgactactggggccagggatccctggtccccgtctcctc

SEQ ID NO: 4912 - DNA, 309 bp, Homo sapiens
aggtctcctgcaaggcttctggttacacttttaccagttatggtatcagctgggtgcgacaggcccctggacaagggcttgagtggatgggatggatcagcactaagaatgttaacacaaactatgcacagaaactccagggcagagtcaccatgaccgcagacacatccacgagcacagcctatatggacttgaggaccttgagatccgacgacacggccgtctatttctgtgcgagaatccacgattttcggagtggttttccccttgattactggggccagggaaccctggtcaccgtctcctcag

SEQ ID NO: 4913 - DNA, 330 bp, Homo sapiens
aggtctcctgcgaggcttctggatacaggttcaccgactactatatagtctggatgcgacaggcccctggacaagggcttgagcgaatgggacggatcaaccctcagagcggtggcacagacgttccacagaagtttcagggcacggtcaccctgaccagggacacgtccatcagcacagcctacatggaactgagcagtctaagatctgacgacacggccctttatttttgtgcgagagatgattgtagtattaccacctgtcgcgttccaaatcaggaccatgcttttgatatctggggccaggggacgatggtcatcatctcttcag

SEQ ID NO: 4914 - DNA, 311 bp, Homo sapiens
cctcacctgcactgtctctggtgcctccatcagtagttactactggaattggatccggcagcccccagggaagggactggagtggattggttatatctatcacactgggagcaccaactccaacccctccctcaagagtcgagtcaccatatcagtagacacgtccaagaaccagttctccctgaagctgagctctgtgaccgctgcggacacggccgtgtattactgtgcgagagcggcgtggcgggatggtaatgatggttattttcttgactactggggccagggaaccctggtcaccgtctcctcag

SEQ ID NO: 4915 - DNA, 315 bp, Homo sapiens
cttcggggaccctgtccctcacctgcgctgtgtctggcgcctccgtcactagtaacaattggtggatctgggtccgccagccccccgggaaggggctagagtggattggggaaatctggcatagtgggaggaccaattacaattcgtccctcaagagtcgactcagcatttcagtagacatcttcaagcaccagttctccctgaatttgaactctctgaccgccgcggacacggccgtgtattactgtgcgaagcgaggtgactggctatggtactttgacgtctggggcccggggatcccggtcactgtctcct

SEQ ID NO: 4916 - DNA, 334 bp, Homo sapiens
cctcacgtgcattgtctctggtgactccatcattacgagcacttactactggggctggatccgtcagtccccagggaaggggctggagtggattggcagtattaattctggcgggagaacgacttacggtccgtccctcgacggtcgagtcaccatgtccgtagacacgtccaacaaccaattgtccctcaaactgaggtctgtgaccgccgcagacacggctgtatattactgtgcgagactcgtgcccgcagagccgtctggcccgggtaattacttctactacttcttcatggacgtctggggcaaagggaccacggtcaccgtcgcctca

SEQ ID NO: 4917 - DNA, 185 bp, Homo sapiens
ccatatactacgcagactctgtgaagggccgattcaccatctccagagacaatgccaagaactcactgtatctgcaaatgaacagcctgagagccgaggacacggctgtgtattactgtgcgagaggtactacggccaccgggatggacgtctggggcaaagggaccacggtcaccgtctcctca

SEQ ID NO: 4918 - DNA, 302 bp, Homo sapiens
gagactctcctacgaagtctctggattcaccgtcagtagtaacttcatgagttgggtccgccgggctccagggaaggggctggaatgggtgtcagttatttatagtggtggtggcacatactacggagactccgtgaagggccgattcaccatctccagagacacttcgaggaactcactgtctcttcaaatgaacagcctgagtgtcgaagacacgggcatatattattgtgcgagagtagggagaaggagttggtacgtggactattggggccacggaaccctggtcaccgtctcgtcag

SEQ ID NO: 4919 - DNA, 293 bp, Homo sapiens
cctgagactctcctgtgcagcctctggatttattttcagtgaatattggatgcagtgggtccggcagaccccagggaaggggctggagtgggtggccaacatacaccctggtggaaatgagagatatcatgtggactctgtgaggggccgattcaccatctccagagacaacgccaagaactcactgtatttgcaaatgaacagcctgagagccgaggacacggctatatattactgtacgagaggagaccctgactactggggccagggaaccctcgtcaccgtctcctcag

SEQ ID NO: 4920 - DNA, 317 bp, Homo sapiens
cctcacctgcgctgtctctggtagctccatcagcaggggttactactgggcctggatccggcagcccccagggaaggggctggagtggattgggagtatctatcatagtgtgaacacctactacaacccgtccctcaagagtcgagtcaccgtgtcagtagacacgtccaagaaccagttgtccctgaggctgacctctgtgaccgccgcagacacggccatgtattactgtgcgagaaaagtaaggggcagctcgcccgaccccctttactactttgactactggggccagggaaccccggtcaccgtctcctcag

SEQ ID NO: 4921 - DNA, 317 bp, Homo sapiens
ccttagactctcctgtgttggctctggattcactttccattatgcctggatgagttgggtccgccacagtccagggaaggggctggagtgggttggccgcgtgaagagccagagtgatggtggggcagcagactatggtgccgccgtgaaaggcagattcaccatctcaagagatgactcaaaaaacacggtctttctgcaaatgaacagcctgaggaccgaagacacaggcgtttattattgtacgcgtaatagtccaattaccgtttttggagttggcccctggggccagggaaccctggtcaccgtctcctcag

SEQ ID NO: 4922 - DNA, 307 bp, Homo sapiens
aggtctcctgcaagggttctggaggcagcttcaataattttgctatcaactgggtgcgacaggcccctggacaagggcttgagtggatgggagggatcagccctatctttggagcagtacaccacgcacagaagttccagggcagagtcacgattaccgcggacattttcacgagcacagcctacatggagctgagcagcctgggatctgaggacacggccatttattattgtgcgagagggctcaattactattactatcacggtatggacgtctggggccaagggaccacggtcatcgtctcctc

SEQ ID NO: 4923 - DNA, 315 bp, Homo sapiens
ctcggtgagggtctcctgcaagggttctggaggcgacttcaacaactttgctatcaactgggtgcgacaggcccctggacaagggcttgagtggatggggggaatcagcccaatttttggaggagttaagcacgcacagaagtttcagggcagggtcacgatcaccgcggacattttcgcgcgcacagtctatatggacctgagcaacctgggatctgatgacacggccatttatttctgtgcgagaggcctcaattactattactatcacggcatggacgtctggggccaagggaccacggtcatcgtctcctc

SEQ ID NO: 4924 - DNA, 317 bp, Homo sapiens
gagactctcctgtgcagcctctggattcacctttagcacgtatgccatgagctgggtccgccaggctccagggaaggggctggagtgggtctcaggaattagtggaagtggtgatgacacctactacgcagactccgtgaagggccggttcaccatctccagagacaattccaagaacacggtgtatctggaaatgagtagcctgagagccgaggacacggccgtatatttctgtgcgaaacttaggagaggtgtaatgcttattaagtactactttgacttctggggccagggaaccctggtcaccgtctcctcag

SEQ ID NO: 4925 - DNA, 330 bp, Homo sapiens
  modified_base (2)..(4): a, c, t, g, unknown or other
tnnnctggagggtccctgagactctcctgcgcagcctctggattcaatttacatagttatgaaatgtattgggtccgccaggctccagggaaggggctggagtgggtctcattcattagtagtagaagtgatgccatctactacgcgggctccgtgcagggccgcttcaccatctccagaaacaacgccgcgaatacattgtatctgcaaatgaacagcctgagagtcgaggacacggctctttattactgtgcgagagatgccgggcgctttttggcctacggtatggacgtctggggccaagggaccacggtcaccgtctcctcagcc

SEQ ID NO: 4926 - DNA, 257 bp, Homo sapiens
tcaccttcactgacttctacatgacatggatccgccagggtccaggcgaggggctggagtggatctcatacatgaacagcggtggaagtgtcatcaggtacgcggactctgtgaagggccgattcaccatctacagggacaacgccaagaagtcagtgcatctggagatgaacagcctgcgacccgacgacacggccgtctattactgtgcgactgggtacggttttgtgggacctcttgcctactggggccaggga

SEQ ID NO: 4927 - DNA, 292 bp, Homo sapiens
  modified_base (8)..(8): a, c, t, g, unknown or other
  modified_base (37)..(37): a, c, t, g, unknown or other
tgtgcagnctctggattcactttcaccaacgcctggntgaactggatccgccaggctccagggaaggggctggagtgggttgcccgtattaaaagaaaaattgagggtgaggcaacagactacgctgcacccgtgaaaggcagattcaccatttcaagagatgattcaagatataccgtgcatctgcaaatggacagcctgaaaagcgaggacacagccgtttattactgttacgggggcgatactgaggtgcgatactggggccagggaaccctggtcaccgtctcctcag

SEQ ID NO: 4928 - DNA, 321 bp, Homo sapiens
tcggtgagggtctcctgcaaggcttctggagccatcttcaacaactatgctatcggctgggtgcggcaggcccctggacaagggcttgagtggatgggacagagcatccctctccttggaacaacaaaatacgcacacaaattccagggcagagtcacaattaccgccgaggattcagggagcacaacctacttggacctgagccgcctgaattttgacgacacggccgtctactactgtgtgaggtgctttggatacagctctaataccccggcgtactttgattactggggccagggaaccctggtcaccgtctcgtca

SEQ ID NO: 4929 - DNA, 320 bp, Homo sapiens
cctgagactctcctgtgcagtctctggtttccccttcaataactttgccatgcactgggtccgccaggctccagggaaggggctgcagtgggtctcctccattactagtagtagtaatgacatatactacgcagactcagtgaagggccgattcaccatctccagagacaacgccaagaactcactgtttctgcaaatgaacagcctgagaaccgacgacacggctgtgtattactgtgcgagagattttaggccttacgatcttttgactggtttgtttgactcctggggccagggaaccctggtcaccgtctcctcag

SEQ ID NO: 4930 - DNA, 306 bp, Homo sapiens
  modified_base (3)..(3): a, c, t, g, unknown or other
gangtttcctgcaaggcatctggatacaggctcaccaggtactacatgcactgggtgcgacaggcccctggacaagggcttgagtggatgggagtaatcgaccctagtggtggtggcaccacctacgcacagaagttccagggcagagtcaccatgaccagggacacgtccacgagcacagtcaacatgcagctgaccagcctgagatctgaggacacggccgtgtattactgtgcgaccttcagtcagggggggctacaaaatgactactggggccagggaaccctggtcaccgtctcctcagca

SEQ ID NO: 4931 - DNA, 304 bp, Homo sapiens
cctgagactctcctgtgcagcctctggattcacctttagtacctattggatgaagtgggtccgccaggctccagggaaggggcttgagtgcgtggccaacatagagcccgatggaagtcagagatggcatgtggactctgtgaagggccgattcaccatctccagagacaacgccaagaactcactgtatctgcaaatgaacagcctgagaggcgaggacacggctatgtattactgtgcgattgtatcccgttccttcgttatggacgtctggggccacgggaccacggtcaccgtctcctca

SEQ ID NO: 4932 - DNA, 318 bp, Homo sapiens
cctgagactctcctgtacagcctctggattcagcttcagtgattctgaaatgaactgggtccgccaggctccagggaaggggctggagtgggttgcatatatttttgctagtggttctaccttattctacgcagactctgtgaagggccgattcaccatctccagagacaacgccaagaactcactctatctgcaaatgaacagcctgagaggcgaggacacggctgtctattactgtgcgaaaacactaagaaagaggaatggttactctggccccattgactcctggggccagggaaccctggtcaccgtctcctc

SEQ ID NO: 4933 - DNA, 308 bp, Homo sapiens
cctcacctgcactgtctttggtggctccatcagtactcactattggagttggatccggcagaccccagggaaggggctggaatgcattggctatatctctgacagcgggaggaccaattacaatccctccctcaagagtcgagtcaccatatcaatagacacgtccaagaaccagttctccctgaaattgaggtctgtgaccgctgcggacacggccgtctatttctgtgcgagggatgacactggtatttccaagaaaaatgcttttgatatttggggccaagggacactggtcaccgtctcttcag

SEQ ID NO: 4934 - DNA, 324 bp, Homo sapiens
aggtctcctgcagggcttctgattacacctttaccagttatggtatcaactgggtgcgacaggcccctggacaagggcttgagtggatgggatggatcagcagttacaatgggaacaagcactatgtacagaagttccagggcagagtcaccatgaccacagacacatccacgaacacagcctacatggagttgaggagcctgagatctgacgacacggccgtgtattactgtgcgagagataacctgccttccctttacggtgactacgaccggaatgcttttgacatctggggccaagggacaatggtcaccgtctcttcag

SEQ ID NO: 4935 - DNA, 309 bp, Homo sapiens
gtgagggtctcctgcaaggcttctggaggcgccttcaggaactttgctatcagctgggtgcgacaggcccctggacaagggcttgagtggatgggagggatcaccgctatctttgggacaacaaactacgcacagaagttccagggcagactcacgattaccgcggacgagtccacgagttcaacctacatggagctgagcagcctgagatctgaggacacggccgtgtattactgtgcgaaaggtcggaactactacgtggactactttgactactggggccagggaagcctggtcaccgtctcctca

SEQ ID NO: 4936 - DNA, 324 bp, Homo sapiens
  modified_base (4)..(4): a, c, t, g, unknown or other
  modified_base (6)..(6): a, c, t, g, unknown or other
  modified_base (8)..(8): a, c, t, g, unknown or other
  modified_base (10)..(10): a, c, t, g, unknown or other
atcngngncntctcctgcaagggttctggacgcaacttcaacaactttgctatcaactgggtgcgacaggcccctggacaagggcttgagtggatgggagggatcagccccatctttggagcagtgaaacacggacaggagttccagggcagagtcacgtttaccgcggacgttttcacgagcacagtttacatggagctgagcagcctgggatctgaggacacggccatttattattgtgcgagagggctcaattactattattatcatggaatggacgtctggggccaagggaccacggtcatcgtctcctcagcctccacc

SEQ ID NO: 4937 - DNA, 274 bp, Homo sapiens
tattggatgagctgggtccgccaggcaccagggaggaggccggagtgggtggccaagataaagcacgatggaagcgagaagtattatgtgggctctgtgcagggccgatttatcatctccaaagacaacgccaagaattttttgtatctgcaaatggaccgcctgagagccgatgacacggctgtctattactgtgcgagagactcccgtatagtgcctactaattactattatgacttctggggccagggaacccaggttaacgtctcttcag

SEQ ID NO: 4938 - DNA, 306 bp, Homo sapiens
tgagactctcctgtgcagtctctggactgagcttcagtgactacttcatgggctggatccgccaggctccagggaaggggccggagtggctttcatacataagtagtagtggttataccatcttctacgcagactctgtgaagggccgattcaccatctccagggacaactccaagaactcactttatttgcaaatgaacagcctgacagccgaggacacggccgtatattactgtgcgagagatcccggtggcagctcttcctttgactactggggccagggaaccctggtcaccgtctcctcag

SEQ ID NO: 4939 - DNA, 226 bp, Homo sapiens
attagtggtagtggtacttacatatattacgcagactcagtgaggggccggttcaccatctccagagacaacgccaagacatcgctgtatctgcaaatgaacagcctgagagccgaggacacggctgtgtactactgtgcgagagttcgttgtggtggtctctgctattcctcggactggtacttcgatgtctggggccgtggcaccctggtcactgtgtcctcag

SEQ ID NO: 4940 - DNA, 296 bp, Homo sapiens
aggtctcgtgcaaggcttctggaggcaccttcaacaactttgcaatcaactgggtgcgacaggcccccggacaagggcttgagtggatgggagggatcagccctatatttggagcaggaaagcacgcacagaagttacagggcagagtcacgattaccgcggacgttttcacgagcacagtctacatggaactgggcagcctgagatctgaggacacggccacgtattattgtgcgagagggctcaattactacttttatcacggtatggacctctggggccaagggaccacggtc

SEQ ID NO: 4941 - DNA, 304 bp, Homo sapiens
ctcggtgagggtctcctgcaagggttctggaggcgacttcaacaactttgctatcaactgggttcgacaggcccctggacaagggcttgagtggatgggaggtatcagtcctatttttggagcagtaaaacacgcacagaagttccagggcagactcaccattaccgcggacgtttttgtgaagacagcctacatggagctgagcagcctaggatttgaggacacggccatttattattgtgcgaaagggctgaattattattattaccacggaatggacgtttggggcctagggaccacggtc

SEQ ID NO: 4942 - DNA, 330 bp, Homo sapiens
ctgagactctcctgcgcagcctctggattcgcctttagtagttatggcatgacttgggtccgccaggctccagggaaggggctggagtgggtctcggctattagcggtagcggtgggagtacatggtacgcagactccgtgaagggccggttcaccatctccagagacaattcccagagcacgctgtttctgcaaatgcacggcctgagagccgacgacacggccatatattattgtgcgaaagacactgccacggtgactacctcactttatttctattaccacggaatggacgtctggggccaagggaccacggtcaccgtctcctca

SEQ ID NO: 4943 - DNA, 320 bp, Homo sapiens
cctgagactctcctgtgcagcctctggattcaccttcaccacctctgccatgagttgggtccgccgggctccagggaaggggttggagtgggtctcaactattagtggtattggtgatactacatactacgctgactccgtgaagggccgcttcaccatctccagagacaactccaagaagtcgctgtatgtgcagttggacagtctgagagccgaggacacggccgtctattattgtgcgaaatctcaaggccccttttacagtgactacgtctactttgagtcctggggccagggagccccggtcaccgtctcttcag

SEQ ID NO: 4944 - DNA, 325 bp, Homo sapiens
cctgagactctcctgtgcagcctctggattcagttttagtagttattggatgacctgggtccgccaggctccagggaaggggctggagtgggtggccaacatcaaccaagatggaagtgagaaagactatgtggactctgtgaagggccgattcaccatctccagagacaacgcccagaactcactgtttctgcaaatggacagcctgagagtcgaggacacggctctgtattattgtgcgagagaggggagttatggtgacacctatcactcctattacggtatggacgtctggggccaagggaccacggtcaccgtctcctca

SEQ ID NO: 4945 - DNA, 370 bp, Homo sapiens
gaggtgcagctggtggagtctgggggaggcttggtaaagccgggggggtcccttagagtctcctgtgcagcctctggattcacttttagtgccgcctggatgaactgggtccgccagactcctgggaaggggctggagtgggttggccgtatttggagcaaatctgatggtctgacaacacaatacgctgcacccgtgcaaggcagattcaccatctcaagagatgattcaaaaaatacactgtatctgcaaatgaacagcctgaaaaccgaggacacagccgtctattactgcaccgctgatctcagcacctcgtccgggcactactttgactactggggccagggaaccctggtcaccgtctcctcag

SEQ ID NO: 4946 - DNA, 308 bp, Homo sapiens
cctgagactctcctgtgcagcctctggattcatctttagtaattattggatgacctgggtccgccaggctccagggaaggggctggagggggtggccaacataaagcaagatgggagtgagacatactatgtggactctgtgaagggccgattcacgatctccagagacaacgcccagaactcactgtatctgcagatgaacagcctgagagccgaggacacggctgtgtatttctgtgcgaggcacagttatgctctccccccccgtgactactggggccagggaaccctggtcaccgtctcctcag

SEQ ID NO: 4947 - DNA, 286 bp, Homo sapiens
tctggtggctccatgagtcctttttattggaactggatccggcagtccccaggaaagggactggaatggattggatatgtctactatgctgggggcaccaggtacaacccctccctcaagagtcgagtcaccataactgaagacacgtccaagaaccagttctccctgaagttgaggtctgtgacggccgcggacacggccgtctactactgtgcgagagggggggggtggctacaatcggactttgacatctggggccagggagccctggtcaccgtgtcctcag

SEQ ID NO: 4948 - DNA, 369 bp, Homo sapiens
  modified_base (9)..(9): a, c, t, g, unknown or other
aagcatgantctcggtgatgtctcctgcaaggcttcaggaggcaccttcaccaactatgctttcagctgggtgcgacaggcccctggacaagggcttgagtggatgggagggatcatccctatctttggtacaacaaactacgcacagaggttccagggcagagtcactattaccgcggacgaatccacgagtacagcttacatggagctgagcagcctgagatcggaagacacggccgtgtattactgtgcgagtagcagtggctggcccagcgaccgctatttccaccactactccgggttggacgtctggggccaagggaccacggtcaccgtctccgcagcatccccgaccagccccaaggtctt

SEQ ID NO: 4949 - DNA, 324 bp, Homo sapiens
  modified_base (7)..(7): a, c, t, g, unknown or other
tcgaggnggagagtctctgaagatctcctgtcagggtttaggatacaattttgccggctactggttcggctgggtgcgccagaggcccggatacggcctggagtggatggggaccatctatcctggcgactcgtctactagatataatccgtcctttcaaggccaaatctccatctcagccgacgactccaccacgaccgcctacctgcagtggcccagcctgaaggcctcggacagcggcacctattattgtgcgggacatacaagcacgactaacttttggggccggggaaccctggtcaccgtctcctcggcatccccgac

SEQ ID NO: 4950 - DNA, 306 bp, Homo sapiens
aggtctcctgcaaggcatctggatacaccttcaccggctactttatccactgggtgcgacaggcccctggacaagggcttgaatggatggggtggatcaaccctaacagtggtggcgcaaactctgcacagaagtttcagggcagggtcaccatgaccagggacacgtccatcaccacagcctacatggacctgaccaggctgacatctgacgacacggccgtgtattactgtgcgaggggggattgtactagtaccagctgttatgtccactggggccagggaaccctggtcaccgtctcctcag

SEQ ID NO: 4951 - DNA, 255 bp, Homo sapiens
  modified_base (9)..(9): a, c, t, g, unknown or other
  modified_base (24)..(24): a, c, t, g, unknown or other
  modified_base (30)..(31): a, c, t, g, unknown or other
  modified_base (38)..(38): a, c, t, g, unknown or other
  modified_base (40)..(40): a, c, t, g, unknown or other
  modified_base (43)..(43): a, c, t, g, unknown or other
  modified_base (63)..(63): a, c, t, g, unknown or other
  modified_base (81)..(81): a, c, t, g, unknown or other
  modified_base (102)..(102): a, c, t, g, unknown or other
  modified_base (105)..(106): a, c, t, g, unknown or other
  modified_base (108)..(110): a, c, t, g, unknown or other
  modified_base (120)..(120): a, c, t, g, unknown or other
aggccttgngtggctgggaagganatactnnttggccnantgntatactgattctgcagtatntgtgaaaggtcgaatagncgtcaacgcagacccatccgnganncnnntctccctgcnactgaactctgtgactcccgaggacacggctgtctactattgtgtaagagagggtcgtgaatacggcgaccgcttctcggtccccaactggtatttcgatctctggggccgtggcacccaggtcactgtctcctc

SEQ ID NO: 4952 - DNA, 337 bp, Homo sapiens
cttcggagaccctgtccctcacctgcagtgtctctggtgtcgccgtcaacactgatctttactactggagctgggtccggcaggccccagggaagggactggaatggattggttatgtctatagccacggaagaaccaactacaacccctccctcaagggccgagtcaccgtttcagcagacccgtccacgaataccttctccctgaacctgatgtctatgaccgctgcggacaaggccgtctactactgtgcgagacacccctcgtatctagccgtggctgacggaagggatgcttttgatatctggggccaggggactatggtcatcgtctcttc

SEQ ID NO: 4953 - DNA, 373 bp, Homo sapiens
ctgcaggagtcgggcccaggactggtgaagccttcggagaccctgtccctcacctgcactgtctctggtggctccatcagcggtagtggttacttctggggctggatccgccagcccccaggggaggggctggaatggattgggactatcaattatggtgggaccgcctactacaacccgtccctcaagagtcgagtcgccatatccgtagacacgtccaagagccaggtctccctgaggctgagctctgtgaccgccgcagacacggctgtgtattattgtgcgagacagccgcctattacgatttttggacttctcaggccggggtggttcggctcctggggccagggaaccctggtcaccgtctcctcag

SEQ ID NO: 4954 - DNA, 339 bp, Homo sapiens
  modified_base (190)..(190): a, c, t, g, unknown or other
cagcctggggggtccctgagactctcctgtgcagcctctggattcagctttagtagctattggatgacttgggtccgccaggctccagggaaggggctggagtgggtggccaacataaaccaagatggaagtgagaaagactttgtggactctgtgaagggccgattcaccatctccagagacaacgccnagagctcactgtttctgcaaatgaacagcctgagagccgaggacacggctgtgtattattgtgcgagagaggggagctatggtgacacctatcactcctactacgctatggacgtctggggccaagggaccacggtcaccgtctcctca

SEQ ID NO: 4955 - DNA, 308 bp, Homo sapiens
  modified_base (25)..(25): a, c, t, g, unknown or other
  modified_base (94)..(94): a, c, t, g, unknown or other
  modified_base (109)..(109): a, c, t, g, unknown or other
  modified_base (134)..(134): a, c, t, g, unknown or other
  modified_base (136)..(136): a, c, t, g, unknown or other
  modified_base (274)..(274): a, c, t, g, unknown or other
  modified_base (283)..(283): a, c, t, g, unknown or other
tgtctctagcgacactgctgcttgnaactggatcaggcagtccccatcgagaggccttgagtggctgggaaggacatattacaggtccaagtgntataatgattatgcngtgtctgtgaaaagtcgaatagccntnaacccagaaacatccaagaaccagttctccctgcagctgaactctgtgactcccgaggacacggctgtctattattgtgcaagagagggtcgtgagtacggtgaccgcttctcggtcccctactggtacttcgatctntggggccgnggcaccctggtcactgtctcctcag

SEQ ID NO: 4956 - DNA, 322 bp, Homo sapiens
tctggggggtccctgagactctcctgtgtaggctctggattcacctttagtaactatcccattaggtgggtccgccaggctccagggaaggggctggagtgggtctcatctattagtgctactggtgctaccatttactacgcagactccgtgaagggccggttcaccatctccagagacaattccaagaacacggtttatctgcaagtgaacagcctgagagccgaggacacggccgtatattactgtgcgagaggcgtcttttcccccgcatattattttgagtactggggccagggaaccctggtcaccgtctcctcag

SEQ ID NO: 4957 - DNA, 361 bp, Homo sapiens
gaggtgcagctgttggagtctgggggaggcttggtacagccgggagggtccctgagactctcctgtgcagcctctggatccacctctaccagctttcccatgagctgggtccgccagtctccagggatggggccggagtgggtctcaagtattagtcgtgatggtattctcacatattacaaagactccgtgaagggccggttcaccctctccagagacaattccaagaacactctgtatctagaaatgaacagcctgacaactgacgacacggccgtttattactgtgcgaaaatcgcggtcagtgggcaatggtacttcgatctctggggccgtggaaccctggtcaccgtctcctcag

SEQ ID NO: 4958 - DNA, 354 bp, Homo sapiens
aggtgcagctggtgcagtctggggctgaggtgaagaagcctgggtcctcggtgagggtgtcctgcaaggcttccggtggcaccttcgacacttacgctttcagctgggtgcgacaggcccctggacaaggccttgagtggatgggaggtatcgtccctatccttggaacgacagactacgcacagaggttccagggcagagtctccattaccgcggacaaagccacgactacagcctacatggacttgagcagcctgagatccgaggacacggccgtctactactgtgtagtctttattacgccaacgataaattatacctggggccacggaaccctggtcaccgtctcctcag

SEQ ID NO: 4959 - DNA, 339 bp, Homo sapiens
cttcggagaccctgtccctcacctgcactgtctctggtggctccttcagcagtaatgcttactactgggactggatccgccagcccccagggaaggggccggagtggattgggagtttctattacagggggaccccctacaacaacccgtccctcaagagtcgagtcaccatatcccttgacacgtccaagaaccagttctccctgaagctgacctctgtgaccgccgcagacacggctgtgtattactgtgcgaggctcgggggcactggcttgaacgggggagacttccaatacggtgtggacatctggggccaagggaccacggtcaccgtctcct

SEQ ID NO: 4960 - DNA, 330 bp, Homo sapiens
gtctcctgcaaggcttctggagtcaccttcagcagttatgctatcagctgggtgcgacaggcccctggacaagggcttgagtggatgggaggggtcctccctatgtttaatgtaccaaagtacgcacagaaatttcagggtagagtcacgattaccgcggacaaatccacgaacacagcctacttggagctgagcagactgagatctgaggacacggccgtgtactactgttcgagacttaatccttcgaggagaccaccacctggggtgccacactactactatggtatggacgtctggggccaagggaccacggtcaccgtctcctca

SEQ ID NO: 4961 - DNA, 191 bp, Homo sapiens
acatattacgcagactccgtgaagggccggttcaccatctccagagacaattctaagaacacggtgtatctccaaataatttctctgcgggtcgaggacacggccgtatattattgcacgagttgttggcccatcctgaatcactattcccctaggccatcctcctggggccagggaaccctggtcaccgt

SEQ ID NO: 4962 - DNA, 315 bp, Homo sapiens
ctcggtgacggtctcctgcaaggcctctggaggcactttcagcagtcgcgcaactagttgggtgcgacaggcccctggacaagggcttgagtggatgggaggaatcatccctatccttgataaaacgaactacgcacagaagttccagggcagagtcacaattaccgcggacagatccacgagcacagcctacatggagctgagcagcctcagatctgaagacacgggcatgtattactgtgcgagcgcgttgcggtatagttttgtttacggtatggacgtctggggccaagggaccacggtcaccgtctcctc

SEQ ID NO: 4963 - DNA, 361 bp, Homo sapiens
caggtgcagctggtggagtctgggggaggcgtggtccagcctgggaggtccctgagactctcctgtgcagcctctggattcaccttcagaagctttgccatgaactgggtccgccaggctccaggcaaggggctggagtgggtggcaggtatatcatatgatggaggtaatgaatactatgtagactccgtgaagggccgattcaccatctccagagacaatgccaagaacacgctgcatctgcaaatgaacagcctgagagctgaggacacggctgtgtattattgtgtgaaagatgcctataacagtggctggcactttgactactggggccagggaaccctggtcaccgtctcctcag

SEQ ID NO: 4964 - DNA, 303 bp, Homo sapiens
cttagactctcctgtgcaccctctggattcactttcactcacgcctggatgacctgggtccgccaggctccagggaagggcctggagtgggttggccgtattaaaagtgaccgtgatggtgggacagcagactacgctgcacccgtgaaaggcagattcaccatctcaaaagatgattcaaagaagacggtctatctgcaaatggacagcctgaaaaccgaggacacagccatatattactgtaccaaacagactggagattttgactcctggggccagggaaccctggtctccgtctcctca

SEQ ID NO: 4965 - DNA, 299 bp, Homo sapiens
ctctggattctccttcagtgattattacatgagctgggtccgccaggctcccgggaaggggctggactgggtttcatccattagtacaagtggaagtattataaactatgctgactcagtgaagggccgatttatcatctccagggacaactccaagagttcactgtttttggacatgagcgacctgcgagtcgaagattcggccctttattattgtgtcagttcatattgtagaggaaacaactgctatggagccccaaactactggggccaaggaacccaggtcaccgtctcctcag

SEQ ID NO: 4966 - DNA, 338 bp, Homo sapiens
cagcctggggggtccctgagactctcctgtgaagcctctggattcatttttagtagctattggatgacctgggtccgccaggctccagggaagggcctggagtgggtggccaacataaaccaagatgggagtgagaaagactatgtggactctgtgaagggccgattcaccatctccagagacaacgccaagaactcactgtatctgcaaatgaacagcctgagagccgaggacacggctgtgtattattgtgcgagagaggggagctatggtgacacctatcacttctactacgctatggacgtctggggccaagggaccacggtcaccgtctcctc

SEQ ID NO: 4967 - DNA, 343 bp, Homo sapiens
gtgcagctggtggagtctgggggaggcttggtacagcctggcaggtccctgagactctcctgtgcagcctctggattcaactttgatgattatgccatgcactgggtctggcaaactccagggaagggcctggagtgggtctcaggtcttagtggagatagtggtaccataggctatgcggactctgtgaagggccgattcaccatctccagagacaacgccaaggactccctatatctgcaaatgaacagtctgagaactgaggacacggccttgtattactgtgtaacccaacagtctttcgatctctggggccgtggcaccctggtcaccgtctcctcag

SEQ ID NO: 4968 - DNA, 357 bp, Homo sapiens
aggtgcagctggtgcagtctggggctgagctaaagaagccgggggcctcagtgaagctctcctgcaaggcttctggatacactttcagcggctactatatgagctgggtgcgacaggcccctggacagggccttgagtggatgggatggatcctcccagccagtggcgacacaaagtactcacagagatttcaggggagggtcaccatgaccacggacacgtccatcagcacagcctacatggacctgaagagtctcacaggtgacgacacggccgtctattattgtgccaaaatcctgcctggaatttatgcctttgatctttggggccaagggacaatggtcaccgtctcttcag

SEQ ID NO: 4969 - DNA, 275 bp, Homo sapiens
  modified_base (46)..(46): a, c, t, g, unknown or other
  modified_base (63)..(63): a, c, t, g, unknown or other
  modified_base (68)..(68): a, c, t, g, unknown or other
  modified_base (70)..(70): a, c, t, g, unknown or other
  modified_base (73)..(73): a, c, t, g, unknown or other
ttactactggggctgggtccgccagcccccggggaaggggctggantgggttgggagtgtgtnttatncnggnatcgcccactataacccgtccctcacgagtcgagtcaccatagatgtagacaggcccaagaatcagttttccctgaaactgacctctgtgaccgccgcagacacggctgtctattactgtgcgagaacgggtggatacagctttgattactcggactactttgacttctggggccagggaaccctggtcaccgtctcctcag

SEQ ID NO: 4970 - DNA, 369 bp, Homo sapiens
gaggtgcagctggtggagtcggggggaggcctggtagagccggggggatctctaagactctcctgtacaggctctggattcccattcattaacgcctacttcagctgggtccgccaggctccagggaagggtctggagtgggttgctcgtattaaaaggcaaagtagtggtgggaccacagactacgctgcacccgtgaagggcagattcaccatctcaagagatgattcaaaaaacaccgtgtatctgcaaatgagcagcctgagaaccgaggacacagccgtgtattactgtgccataccgccggtcccttactactactactactcggacgtctggggcaaagggaccacggtcaccgtctcctca

SEQ ID NO: 4971 - DNA, 378 bp, Homo sapiens
tgcagctgcaggagtcgggcccaggactggtgaagccttcggagaccctgtccctcacctgcactgtctctggtgcctccatgaatagtgaagccttctactggggctggatccgccagtccccaggcaaggggctggagtccattgggagtatgtcctatagtgggaccccctactacaagccgtccctcaagagtcgcgtcagcatatctcttgacacgtccaagagttcgttctctctgaagctgacctctgtgaccgccgcagacacggctgtctatttctgtgcgagacaaagacgtgtttcgatttttggattacttctgccaggggagtttgacacctggggccagggagccctggtcaccgtctcctcag

SEQ ID NO: 4972 - DNA, 384 bp, Homo sapiens
tgcagctgcaggagtcgggcccaggactggtgaagccttcggagaccctgtccctcacctgcactgtctctggtggctccatcagcagtagtagttactactggggcgggatccgccagcccccagggaaggggctggagtggattgggagtatctattatagtgggagcacctacgacaacccgtccctcaagagtcgagtcaccatatccgtagacacgtccaagaaccagttctccctgaagctgagctctgtgaccgccgcagacacggctgtgtattactgtgcgagacataatgaccattattgtagtagtaccagctgctatcccgtcgggtacttcgatctctggggccgtggcaccctggtcaccgtctcctcag

SEQ ID NO: 4973 - DNA, 364 bp, Homo sapiens
  modified_base (2)..(5): a, c, t, g, unknown or other
cnnnnggggctcaagtgatgtctcctgcaggcttctggatacaccttcaccggctactatatgcactgggtgcgacaggcccctggacaagggcttgagtggatgggatggatcaaccctaacagtggtggcaccaactatgcacacaagtttcagggcagggtcaccatgaccagggacacgtccatcagcacagcctacatggagctgagcaggctgagatctgacgacacggccatgtattactgtgcgagagccctctattactatgatagtagtggttttccagtcctctactactttgactactggggccagggaaccctggtcaccgtctcctcagcctccaccaagggcccatcgg

SEQ ID NO: 4974 - DNA, 363 bp, Homo sapiens
tgcagctgcaggagtcgggcccaggactggtgaagccttcggagaccctgtccctcacctgcactgtctctggtggctccatcagcagtagtagttactactggggctggatccgccagcccccagggaaggggctggagtggattgggagtatctattatagtgggagcacctactacaacccgtccctcaagagtcgagtcaccatatccgtagacacgtccaagaagcagttctccctgaagctgagctctgtgaccgccgcagacacggctgtgtattactgtgcgagacttccacggggtgatacgctctactactttgactactggggccagggaaccctggtcaccgtctcctcag

SEQ ID NO: 4975 - DNA, 311 bp, Homo sapiens
cctgagactctcctgtgctgcctctgggttcaggtttagcacctttgccatgagctgggtccgccagtctccagggaaggggctggaatgggtctcagctattagtgggcctggtcggggcacatactacacagactccgtggagggccgcttcaccatctccagagacaactccaagaacgtggtgtttcttcaaatgaacagcctgagagccgaggacacggccgtttatttctgtgcgaaaggagccaactggggatcttggttccttgactcctggggccagggaaccctggtcaccgtctcctcag

SEQ ID NO: 4976 - DNA, 331 bp, Homo sapiens
cctcacctgcactgtctctggtggctccatcagcagtagtagttactactggggctggatccgccagcccccagggaaggggctggagtggattgggagtatctattatagtgggagcacctactacaacccgtccctcaagagtcgagtcaccatatccgtagacacgtccaagaaccagttctccctgaagctgagctctgtgaccgccgcagacacggctgtgtattactgtgcgggccgcaggggatacgatttttggagtggttattataactactactacggtatggacgtctggggccaagggaccacggtcaccgtctcctca

SEQ ID NO: 4977 - DNA, 326 bp, Homo sapiens
cctgagactctcctgtgcagcctctggattcaccttcagtagctatggcatgcactgggtccgccaggctccaggcaaggggctggagtgggtggcagttatatcatatgatggaagtaataaatactatgcagactccgtgaagggccgattcaccatctccagagacaattccaagaacacgctgtatctgcaaatgaacagcctgagagctgaggacacggctgtgtattactgtgcgaaagaggggtgggcatattgtggtggtgactgctattcatactttgactactggggccagggaaccctggtcaccgtctcctcag

SEQ ID NO: 4978 - DNA, 328 bp, Homo sapiens
cttcggagaccctgtccctcacctgcactgtctctggtggctccatcagttattactactggacctggattcggcagccccccgggaagggactgcagtggattgggtttatctatgacagtgggagcaccaactacaacccctccctcaagagtcgagtcaccatgtcagtagacacgtccaagaaccagttctccctgaagctgagctcagtgaccgctgcggacacggccatgtattactgtgcgagaggcaagaggggtgggaaccccgatttttcgcagcggttcgacccctggggccagggagccctggtcaccgtctcctc

SEQ ID NO: 4979 - DNA, 343 bp, Homo sapiens
cctgagactctcctgtacaacttctggattcacctttggtgattatgctatgagctgggtccgccaggctccagggaaggggctggagtgggtaggtttcattagagccaaaccttatggtgggacgacagaatacgccgcgtctctgaaaggcagattcaccatctcaagagatgattccaaaagcgtcgcctatctgcaaatgaacagcctgaaaaccgaagacacagccgtgtatttttgtgctagaggggggcatacagctatggttacgaccccgtatttctactactactacggtatggacgtctggggccaagggaccacggtcaccgtctcctca

SEQ ID NO: 4980 - DNA, 333 bp, Homo sapiens
  modified_base (10)..(10): a, c, t, g, unknown or other
  modified_base (15)..(15): a, c, t, g, unknown or other
agaccttgtncctcncctgcactgtctctggtggctccatcagcagtggtggttactactggagctggatccgccagcacccagggaagggcctggagtggattgggtacatctattacagtgggagcacctactacaacccgtccctcaagagtcgagttaccatatcagtagacacgtctaagaaccagttctccctgaagctgagctctgtgactgccgcggacacggccgtgtattactgtgcgagagctcctgacgatttttggagtggttattgggggtactactttgactactggggccagggaaccctggtcaccgtctcctcag

SEQ ID NO: 4981 - DNA, 326 bp, Homo sapiens
cctgagactctcctgtgcagcctctggattcacctttgatgattatgccatgcactgggtccgtcaagttccagggaagggtctggagtgggtctctcttattagtggggatggtggtagcacatactatgcagactctgtgaagggccgattcaccatctccagagacaacagcaaaaactccctgtatctgcaaatgaacagtctgagaactgaggacaccgccttgtattactgtgcaaactcggagtgggagctactcggtccttctacttggtggtacttcgatctctggggccgtggcaccctggtcactgtctcctcag

SEQ ID NO: 4982 - DNA, 309 bp, Homo sapiens
tggggcctcagtgaaggtctcctgcaaggcttctggatacaccttcatcggctactatatgcactgggtgcgacaggcccctggacaagggcttgagtggatgggatggatcaaccctaacactggtggcacaaactatgcacagaagtttcagggcagggtcaccatgaccagggacacgtccatcagcacagcctacatggagctgagcaggctgagatctgacgacacggccgtgtattactgtgcgagagaagaaggtgggagctactttgactggggccagggaaccctggtcaccgtctcctc

SEQ ID NO: 4983 - DNA, 315 bp, Homo sapiens
gcactgtctctggtggctccatcagcagtagtagttactactggggctggatccgccagcccccagggaaggggctggagtggattgggagtatctattatagtgggaacacctactacaacccgtccctcaagagtcgagtcaccatatccgtagacacgtccaagaaccagttctccctgaagctgagctctgtgaccgccgcagacacggctgtgtattactgtgggagacatgccgtaacgacatggtataactggaactatcacccatttgactactggggccagggaaccctggtcaccgtctcctcag

SEQ ID NO: 4984 - DNA, 317 bp, Homo sapiens
cctcacctgcactgtctctggtggctccatcagcagtagtagttactactggggctggatccgccagcccccagggaaggggctggagtggattgggagtatgtattatagtgggaacacctactacaacccgtccctcaagagtcgagtcaccatatccgtagacacgtccaagaaccagttctccctgaagctgagctctgtgaccgccgcagacacggctgtgtattactgtgcgagacatcccgtcaactacggtgactacgtagagtggttcgacccctggggccagggaaccctggtcaccgtctcctcag

SEQ ID NO: 4985 - DNA, 311 bp, Homo sapiens
cctgagactctcctgtgcagcgtctggattcaccttcagtacctatggcatgcactgggtccgccaggctccaggcaaggggctggagtgggtggcagttatatggtatgatggaagtaataaatactatgcagactccgtgaagggccgattcaccatctccagagacaattccaagaacacgctgtatctgcaaatgaacagcctgagagccgaggacacggctgtgtattactgtgcgagagatagtgagggcagtggctggtactttgactactggggccagggaaccctggtcaccgtctcctcag

SEQ ID NO: 4986 - DNA, 331 bp, Homo sapiens
cctgagactctcctgtgcagcctccggattcaagttcagtgactatggcatgcactgggtccgccaggctccaggccaggggctgcaatgggtggcagtcacatcatttgttggaactatgaaatattatgccgactccctgaagggccgattcaccatctccagagacaattccaagaacacgctgtatttgcaaatgaacaacctgagagctgaggactcgggtgtgtacttctgtgcgaaagttggctggtccctgcagtggcttaatttgggctactctaacgacatggacgtctggggccaagggaccacggtcatcgtctcctca

SEQ ID NO: 4987 - DNA, 326 bp, Homo sapiens
aggtctcctgcaaggcttctggttacacctttaccagctatggtatcagctgggtgcgacaggcccctggacaagggcttgagtggatgggatggatcagcgcttacaatggtaacacaaactatgcacagaagctccagggcagagtcaccatgaccacagacacatccacgagcacagcctacatggagctgaggagcctgagatctgacgacacggccgtgtattactgtgcgagatcacacacttcggggagttatttgtggcgggatctcccgtactggttcgacccctggggccagggaaccctggtcaccgtctcctca

SEQ ID NO: 4988 - DNA, 350 bp, Homo sapiens
ggtccatgagactctcctgtgcagcctctggattcaccttcagtgactactacatgagctggatccgccaggctccagggaaggggctggagtgggtttcatacattagtagtagtggtagtaccatatactacgcagactctgtgaagggccgattcaccatctccagggacaacgccaagaactcactgtatctgcaaatgaacagcctgagagccgaggacacggccgtgtattactgtgcgagagaagggcataggcatagcagcaggtggcgagacacgggctattactactactactactacatggacgtctggggcaaagggaccacggtcaccgtctcctca

SEQ ID NO: 4989 - DNA, 365 bp, Homo sapiens
  modified_base (2)..(2): a, c, t, g, unknown or other
  modified_base (4)..(4): a, c, t, g, unknown or other
  modified_base (6)..(6): a, c, t, g, unknown or other
  modified_base (15)..(15): a, c, t, g, unknown or other
anantntgagcttcnagaccctgtccctcacctgcactgtctctggtggctccatcagcagtggtggttactactggagctggatccgccagcacccagggaagggcctggagtggattgggtacatctattacagtgggagcacctactacaacccgtccctcaagagtcgagttaccatatcagtagacacgtctaagaaccagttctccctgaagctgagctctgtgactgccgcggacacggccgtgtattactgtgcgagagattctaatgaggcagctcgagggtcggagtactggtacttcgatctctggggccgtggcaccctggtcactgtctcctcagcctccaccaagggccca

SEQ ID NO: 4990 - DNA, 351 bp, Homo sapiens
  modified_base (2)..(8): a, c, t, g, unknown or other
  modified_base (310)..(310): a, c, t, g, unknown or other
gnnnnnnngagtctctgaggatctcctgtaagggttctggatacagctttaccagctactggatcagctgggtgcgccagatgcccgggaaaggcctggagtggatggggaggattgatcctagtgactcttataccaactacagcccgtccttccaaggccacgtcaccatctcagctgacaagtccatcagcactgcctacctgcagtggagcagcctgaaggcctcggacaccgccatgtattactgtgcgagacaagattactatgatagtagtggttactccacggagtattacggtatggacgnctggggccaagggaccacggtcaccgtctcctcagcctcca

SEQ ID NO: 4991 - DNA, 329 bp, Homo sapiens
cctgagactctcctgtgcagcctctggattcaccttcagtagctatggcatgcactgggtccgccaggctccaggcaaggggctggagtgggtggcagttatatcatatgatggaagtaataaatactatgcagactccgtgaagggccgattcaccatctccagagacaattccaagaacacgctgtatctgcaaatgaacagcctgagagctgaggacacggctgtgtattactgtgcgaaagatcagtccggttttgtactaatggtgtatgctatacattcgcctgggtactggggccagggaaccctggtcaccgtctcctcag

SEQ ID NO: 4992 - DNA, 287 bp, Homo sapiens
gagactctcctgtgcagcctctggattcacctttgatgattatgccatgcactgggtccgtcaagctccagggaagggtctggagtgggtctctcttattagtggggatggtggtagcacatactatgcagactctgtgaagggccgattcaccatctccagagacaacagcaaaaactccctgtatctgcaaatgaacagtctgagaactgaggacaccgccttgtattactgtgcaaaagatggcggtgacttgagccagggaaccctggtcaccgtctcctcag

SEQ ID NO: 4993 - DNA, 320 bp, Homo sapiens
cctgagactctcctgtgcagcctctggattcacctttagtagctattggatgagctgggtccgccaggctccagggaaggggctggagtgggtggccaacataaagcaagatggaagtgagaaatactatgtggactctgtgaagggccgattcaccatctccagagacaacgccaagaactcactgtatctgcaaatgaacagcctgagagccgaggacacggccgtgtattactgtgcgagagagggtagcagcagctgggagttttacaactggttcgacccctggggccagggaaccctggtcaccgtctcctcag

SEQ ID NO: 4994 - DNA, 357 bp, Homo sapiens
gaggtgcagctggtggagtctggaggaggcttgatccagcctggggggtccctgagactctcctgtgcagcctctgggttcagtgtcaggagcaactacttgacctgggtccgccaggctccagggaaggggctggagtgggtctcagttatttatagcggtgatagcacagactacgcagactccgtgaagggccgattcaccttctccagagacaattccaagaacacggtgtatcttcaaatgaacagcctgagagccgaggacacggccgtttattactgtgcgaaattgatggtggacctcgactattatatggacgtctggggcaaagggaccacggtcaccgtctcctca

SEQ ID NO: 4995 - DNA, 372 bp, Homo sapiens
aggtgcagctggtgcagtctggggctgaggtgaagaagcctggggcctcagtgaaggtctcctgcaaggcttctggatacaccttcaccggctactatatgcactgggtgcgacaggcccctggacaagggcttgagtggatgggatggatcaaccctaacagtggtggcacaaactatgcacagaagtttcagggcagggtcaccatgaccagggacacggccatcagcacagcctacatggagctgagcaggctgagatctgacgacacggccgtgtattattgtgcgagagaccccacgccatacagtaacgctcagctatgttggttcgacccctggggccagggaaccctggtcaccgtctcctcag

SEQ ID NO: 4996 - DNA, 314 bp, Homo sapiens
tgagactctcctgtgcagcctctggattcacctttgatgattatgccatgcactgggtccgtcaagctccagggaagggtctggagtgggtctctcttattagtggggatggtggtagcacatactatgcagactctgtgaagggccgattcaccatctccagagacaacagcaaaaactccctgtatctgcaaatgaacagtctgagaactgaggacaccgccttgtattactgtgcaaaagacccgttacgatacagctctttatacggtatggacgtctggggccaagggaccacggtcaccgtctcctca

SEQ ID NO: 4997 - DNA, 325 bp, Homo sapiens
  modified_base (51)..(51): a, c, t, g, unknown or other
  modified_base (55)..(55): a, c, t, g, unknown or other
gtccctcacctgcactgtctctggtggctccatcagcagtggtggttactnctgnagctggatccgccagcacccagggaagggcctggagtggattgggtacatctattacagtgggagcacctactacaacccgtccctcaagagtcgagttaccatatcagtagacacgtctaagaaccagttctccctgaagctgagctctgtgactgccgcggacacggccgtgtattactgtgcgagaggacaggattacgatattttgactcgtagttcatactacatggacgtctggggcaaagggaccacggtcaccgtctcctca

SEQ ID NO: 4998 - DNA, 322 bp, Homo sapiens
cttcggagaccctgtccctcacctgcactgtctctggtggctccatcagtaattactattggacctggatccggcagcccccagggaagggactggagtggattgggaatgagtattacagtgggagcaccaactacaacccctccttcaagagtcgagtcaccatatcagtagactcgtccaagaaccaattctccctgaaactgagctctgtgaccgccgccgacacggccgtgtattactgtgcgagagaaagccatgactacagtaactatcgattctttgactcctggggccgggggaccctggtcaccgtctcctc

SEQ ID NO: 4999 - DNA, 326 bp, Homo sapiens
aggcttctggatacaccttcaccggctactatatgcactgggtgcgacaggcccctggacaagggcttgagtggatgggatggatcaaccctaacagtggtggcacaaactatgcacagaagtttcagggcagggtcaccatgaccagggacacgtccatcagcacagcctacatggagctgagcaggctgagatctgacgacacggccgtgtattactgtgcgagccccctaggatattgtagtagtaccagctgctatagaacttactactactactacggtatggacgtctggggccaagggaccacggtcaccgtctcctca

SEQ ID NO: 5000 - DNA, 320 bp, Homo sapiens
cctcacctgcactgtctctggtggctccatcagcagtagtagttactactggggctggatccgccagcccccagggaaggggctggagtggattgggaatatctattatagtgggaacacctactacaacccgtccctcaagagtcgagtcaccatatccgtagacacgtccaagaaccagttctccctgaagctgagctctgtgaccgccgcagacacggctgtatattactgtgcgagactgacggttccctcaattagatcgtggtcgtccaggttcgacccctggggccagggaaccctggtcaccgtctcctcag

SEQ ID NO: 5001 - DNA, 291 bp, Homo sapiens
ctgagactctcctgtgcagcctctggattcaccttcagtagctacgacatgcactgggtccgccaagctacaggaaaaggtctggagtgggtctcagctattggtactgctggtgacacatactatccaggctccgtgaagggccgattcaccatctccagagaaaatgccaagaactccttgtatcttcaaatgaacagcctgagagccggggacacggctgtgtattactgtgcaagagacctgtccatggacgtctggggcaaagggaccacggtcaccgtctcctca

SEQ ID NO: 5002 - DNA, 303 bp, Homo sapiens
tgagactctcctgtgcagcctctggattcacctttgatgattatgccatgcactgggtccggcaagctccagggaagggcctggagtgggtctcaggtattagttggaatagtggtagcataggctatgcggactctgtgaagggccgattcaccatcttcagaaacaacgccaagaactccctgtatctgcaaatgaacagtctgagagctgaggacacggccttgtattactgttcacagggggacggtacggtggggtttcactactggggccagggaaccctggtcaccgtctcctcag

SEQ ID NO: 5003 - DNA, 305 bp, Homo sapiens
gagactctcctgtgcagcctctggattcaccttcagtagctatggcatgcactgggtccgccaggctccaggcaaggggctggagtgggtggcagttatatcatatgatggaagtaataaatactatgcagactccgtgaagggccgattcaccatctccagagacaattccaagaacacgctgtatctgcaaatgaacagcctgagagttgaggacacggctgtgtattactgtgcgagaatccactacggtgactacttcgttgactcctggggccagggaaccctggtcaccgtctcctcag

SEQ ID NO: 5004 - DNA, 355 bp, Homo sapiens
gaggtgcagctggtggagtctgggggaggcttggtaaagcctggggggtcccttagactctcctgtgcagcctctggattcattttcaataacgcctggatgagctgggtccgccagcctccagggaaggggctgcagtgggttggccattttaaaatcaaagctgatggtgggacaacagactacgctgcacccgtgaaaggcagattcaccatctcaagagatgaatcaaaaaacatgctgtatctgcaaatgaacagcctgaaaaccgaggacacagccatttattactgtaccacaggtactacgtactttgactactggggccagggaaccctggtcaccgtctcctcag

SEQ ID NO: 5005 - DNA, 323 bp, Homo sapiens
cctcacctgcactgtctctggtggctccatcagcagtagtaattactactggggctggatccgccagcccccagggaaggggctggagtggattgggagtatctattatagtgggaacacctactacaacccgtccctcaagagtcgagtcaccatatccgtagacacgtccaagaaccagttctccctgaagctgagctctgtgaccgccgcagacacggctgtgtattactgtgcgagacatgccgtaacgacatggtataactggaactatcacccatttgactactggggccagggaaccctggtcaccgtctcctcag

SEQ ID NO: 5006 - DNA, 364 bp, Homo sapiens
gaggtgcagctggtggagtctgggggaggcttggtccagcctggggggtccctgagactctcctgtgcagcctctggattcaccttcagtagctatcctatgcactgggtccgccaggctccagggaagggactggaatatgtttcagctattagtagtaatgggggtagcacattttatgcaaactctgtgaagggcagattcaccatctccagagacaattccaagaacacgctgtatcttcaaatgggcagcctgagcgctgaagacatggctgtgtattactgtgcgagagatggaggggatgaattcgctgaatacttccagcactggggccagggcaccctggtcaccgtctcctcag

SEQ ID NO: 5007 - DNA, 326 bp, Homo sapiens
ccctcacctgcactgtctctggtggctccatcagcagtagtagttactactggggctggatccgccagcccccagggaaggggctggagtggattgggagtatctattatagtgggagcacctactacaacccgtccctcaagagtcgagtcaccatatccgtagacacgtccaagaaccagttctccctgaagctgagctctgtgaccgccgcagacacggctgtgtattactgtgcgagtcaagtgggactacgcgtagttatttcttactactactactacatggacgtctggggcaaagggaccacggtcaccgtctcctca

SEQ ID NO: 5008 - DNA, 317 bp, Homo sapiens
cctcacctgcactgtctctggtggctccatcagcagtagtagttactactggggctggatccgccagccccccgggaagggactggagtggattgggagtatctattatagtgggcgcacctactacaacccgtccctcaagagtcgagtcaccatatccgtagacacgtccaagaaccagttctccctgaggctgagctctgtgaccgccgcagacacggctgtgtattactgtgcgagacatccggtcgagtatagcagcttagctggagcttttgatatctggggccaagggacaatggtcaccgtctcttcag

SEQ ID NO: 5009 - DNA, 372 bp, Homo sapiens
gaggtgcagctggtgcagtctggagtagaagtgaaaaagcccggggagtctctgaagatctcctgtaagggttctggatacagcttcaccagttactggatcggctgggtgcgccagatgcccgggaaaggcctggagtggatgggggtcatctatcctagtgactctgacaccagatacagcccgtccttccaaggccaggtcaccatctcagccgacacgtccatcagcaccgcctacctgcagtggagcagcctgaaggcctcggacaccgccatgtactactgtgcgagacaaggcgctggggatcttccctacaagtactacttcatggacgtctggggcagagggaccacggtcaccgtctcctca

SEQ ID NO: 5010 - DNA, 314 bp, Homo sapiens
  modified_base (43)..(43): a, c, t, g, unknown or other
  modified_base (80)..(80): a, c, t, g, unknown or other
cctcacctgcactgtctctggtggctccatcagcagtagtagntactactggggctggatccgccagcccccagggaagnggctggagtggattgggagtatctattatagtgggaacacctactacaacccgtccctcaagagtcgagtcaccatatccgtagacacgtccaagaaccagttctccctgaagctgagctctgtgaccgccgcagacacggctgtgtattactgtgcgagacatccagtagagtatagtagctcgtccggctttgactactggggccagggaaccctggtcaccgtctcctcag

SEQ ID NO: 5011 - DNA, 317 bp, Homo sapiens
cctcacctgcactgtctctgatggctccatcagcagtagtagttactactggggctggatccgccagcccccagggaaggggctggagtggattgggagtatctattatagtgggagcacctactacaacccgtccctcaagagtcgagtcaccatatccgtagacacgtccaagaaccagttctccctgaagctgagctctgtgaccgccgcagacacggctgtgtattactgtgcgagcctgtattacgatttttggagtggttatttcggtggggactactggggccagggaaccctggtcaccgtctcctcag

SEQ ID NO: 5012 - DNA, 320 bp, Homo sapiens
cctcacctgcactgtctctggtggctccatcagcagtggtggttactactggagctggatccgccagcacccagggaagggcctggagtggattgggtacatccattacagtgggagcacctactacaacccgtccctcaagagtcgagttaccatatcagtagacacgtctaagaaccagttctccctgaagctgagctctgtgactgccgcggacacggccgtgtattactgtgcgagatcgacgccgtataactggaactccccgtcccccgcctttgactactggggccagggaaccctggtcaccgtctcctcag

SEQ ID NO: 5013 - DNA, 304 bp, Homo sapiens
  modified_base (107)..(107): a, c, t, g, unknown or other
cctgagactctcctgtgcagcgtcaggattcaccttcagtagatatggcatgcactgggtccgccaggctccaggcaaggggctggagtgggtggcagttatatggnatgatggaagtaataaatactatgcagactccgtgaagggccgattcaccatctccagagacaattccaagaacacgctgtatctgcaaatgaacagcctgagagccgaggacacggctgtgtattactgtgcgagagatagggaaaactggtacttcgatctctggggccgtggcaccctggtcactgtctcctca

SEQ ID NO: 5014 - DNA, 317 bp, Homo sapiens
  modified_base (54)..(54): a, c, t, g, unknown or other
cctgagactctcctgtgcagcctctggattcaccttcagtgactactacatganctggatccgccaggctccagggaaggggctggagtgggtttcatacattagtagtagtggtagtaccatatactacgcagactctgtgaagggccgattcaccatctccagggacaacgccaagaactcactgtatctgcaaatgaacagcctgagagccgaggacacggccgtgtattactgtgcgagagatggggatagcagtggctggtacgccagatttgactactggggccagggaaccctggtcaccgtctcctcag

SEQ ID NO: 5015 - DNA, 339 bp, Homo sapiens
  modified_base (2)..(2): a, c, t, g, unknown or other
  modified_base (8)..(8): a, c, t, g, unknown or other
  modified_base (10)..(10): a, c, t, g, unknown or other
gnaggctncngaccctgtcctcacctgcactgtctctggtggctccatcgacactgctgattattactggagttggatccgccagcacccagggaagggcctggactttattgggtacatctattacactgggagcaccttttatgccccgtcactcaggagccgtctgaccgtatcaatagacacgtctaacaaccacttctccctgaacctgacctctgtgactgccgcggacacggccgtctattactgtgcgagaggtctccgggaccccttatcgtggtacttggacgtctggggcaaagggaccacggtcaccgtctcttccgcctccaccaa

SEQ ID NO: 5016 - DNA, 323 bp, Homo sapiens
cctgagactctcctgtgcagcctctggattcaccttcagtgactactacatgagctggatccgccaggctccagggaaggggctggagtgggtttcatacattagtagtagtagtagttacacaaactacgcagactctgtgaagggccgattcaccatctccagagacaacgccaagaactcactgtatctgcaaatgaacagcctgagagccgaggacacggctgtgtattactgtgcgagagatcccgaccaactatttgtacaggacccatactactttgactactggggccagggaaccctggtcaccgtctcctcag

SEQ ID NO: 5017 - DNA, 332 bp, Homo sapiens
tgagactctcctgtgcagcctctggattcaccttcagtagctatagcatgaactgggtccgccaggctccagggaaggggctggagtgggtctcatccattagtagtagtagtagttacatatactacgcagactcagtgaagggccgattcaccatctccagagacaacgccaagaactcactgtatctgcaaatgaacagcctgagagccgaggacacggctgtgtattactgtgcgagaggaagtctggacgatttttggagtggttggatcgaagattactactacatggacgtctggggcaaagggaccacggtcaccgtctcctca

SEQ ID NO: 5018 - DNA, 332 bp, Homo sapiens; identical to SEQ ID NO: 5017

SEQ ID NO: 5019 - DNA, 323 bp, Homo sapiens; identical to SEQ ID NO: 5016

SEQ ID NO: 5020 - DNA, 370 bp, Homo sapiens
gtgcagctggtggagtctgggggaggcgtggtacagcctggggggtccctgagactctcctgtgcagcctctggattcacctttgatgattatgccatgcactgggtccgtcaagctccagggaagggtctggagtgggtctctcttattagtggggatggtggtagcacatactatgcagactctgtgaagggccgattcaccatctccagagacaacagcaaaaactccctgtatctgcaaatgaacagtctgagaactgaggacaccgccttgtattactgtgcaaaagatccgaccccgtatagtgggagatacttcacctggttcgacccctggggccagggaaccctggtcaccgtctcctcag

SEQ ID NO: 5021 - DNA, 372 bp, Homo sapiens
aggtgcagctggtggagtctgggggaggcttggtcaagcctggagggtccctgagactctcctgtgcagtctctggattcaccttcagtgactactacatgagctggatccgccaggctccagggagggggctggagtgggtttcattcattagtagtattggtcgtaccgtatactacgcagactctgtgaagggccgattcaccatctccagggacgacgccaagaactccctgtatctggaaatgcacagcctgagagccgaggacacggccgtatatttctgtgcgagagatccggggggctttggagtggtcgccccatactactttgactactggggccagggaaccctggtcaccgtctcctcag

SEQ ID NO: 5022 - DNA, 369 bp, Homo sapiens
tgcagctgcaggagtcgggcccaggactggtgaagccttcggagaccctgtccctcacctgcactgtctctggtggctccatcagcagtagtagttactactggggctggatccgccagcccccagggaaggggctggagtggattgggagtatctattatagtgggaacacctactacaacccgtccctcaagagtcgagtcaccatatccgtagacacgtccaagaaccagttctccctgaagctgagctctgtgaccgccgcagacacggctgtgtattactgtgcgagacaccccgtcaactacggtgactacgtagagtggttcgacccctggggccagggaaccctggtcaccgtctcctcag

SEQ ID NO: 5023 - DNA, 311 bp, Homo sapiens; identical to SEQ ID NO: 4985

SEQ ID NO: 5024 - DNA, 335 bp, Homo sapiens
tgagactctcctgtgcagcctctggattcaccttcagtagttatgaaatgaactgggtccgccaggctccagggaaggggctggagtgggtttcatacattagtggtagtggtggtaccatatactacgcagactctgtgaggggccgattcaccatctccagagacaacgccaagaactcactgtatctgcaaatgaacagcctgagagccgaggacacggctgtttattactgtgcgagagtagggactgagcgtattacgatttttggagtggttattagtgcggcggctatggacgtctggggccaagggaccacggtcaccgtctcctca

SEQ ID NO: 5025 - DNA, 326 bp, Homo sapiens
tgagactctcctgtgcagcctctggattcaccttcagtagctatagcatgaactgggtccgccaggctccagggaaggggctggagtgggtctcatccattagtagtagtggtagttacatatactacgcagactcactgaagggccgattcaccatctccagagacaacgccaagaactcactgtatctgcaaatgaacagcctgagagccgaggacacgtctgtgtattactgtgcgagatcggtctacgacacgaaaccaatgacttactactactactacatggacgtctggggcaaagggaccacggtcaccgtctcctca

SEQ ID NO: 5026 - DNA, 303 bp, Homo sapiens
aggcatctggatacaccttcaccagctactatatgcactgggtgcgacaggcccctggacaagggcttgagtggatgggaataatcaaccctagtggtggtagcacaagctacgcacagaagttccagggcagagtcaccatgaccagggacacgtccacgagcacagtctacatggagctgagcagcctgagatctgaggacacggccgtgtattactgtgcgagaggcgtattactatggtttggggagaacgaaaacaatgactactggggccagggaaccctggtcaccgtctcctcag

SEQ ID NO: 5027 - DNA, 207 bp, Homo sapiens
ccatatactacgcagactctgtgaagggccgattcaccatctccagagacaatgccaagaactcactgtatctgcaaatgaacagcctgagagacgaggacacggctgtgtattactgtgcgagacggggtggggcgtgcggtagtggtggtagctgcttgccttttgactactggggccagggaaccctggtcaccgtctcctcag

SEQ ID NO: 5028 - DNA, 337 bp, Homo sapiens
cgttcggagaccctgtccctcacctgcactgtctctggtggctccatcagcagtagtagttactactggggctggatccgccagcccccagggaaggggctggagtggattgggagtatctattatagtgggaacacctactacaacccgtccctcaagagtcgagtcaccatatccgtagacacgtccaagaaccagttctccctgaagctgagctctgtgaccgccgcagacacggctgtgtattactgtgcgagacatggtgtagagtatagcacctcgtcgtgctttgactactggggccagggaaccctggtcaccgtctcctcagcctcca

SEQ ID NO: 5029 - DNA, 364 bp, Homo sapiens
caggtgcagctgcaggagtcgggcccaggactggtgaagccttcacagaccctgtccctcacctgcactgtctctggtggctccatcagcagtggtgattactactggagttggatccgccagcccccagggaagggcctggagtggtttgggttcatctattacagtgggagcacctactacaacccgtccctcaagagtcgagttaccatatcagtagacacgtccaagaaccagttctccctgaagctgagctctgtgactgccgcagacacggccgtgtattactgtgccagaggacggagtggcagctcgtgggactttggctactggggccagggaaccctggtcaccgtctcctcag

SEQ ID NO: 5030 - DNA, 314 bp, Homo sapiens
cctcacctgcactgtctctggtgactccatcagtaattattactggacctggatccggcagcccccagggaagggactggagtggattgggtatttctatgacagtgggagccttaactacaacccctccctcaagagtcgagtcaccatatcagtagacacgtccaagagtaacttctccctgaagctgagatctgtgaccgctgcggacacggccgtgtattactgtgcgagaggcaagaggggtgggaaccccgatttttcgcagaggttcgacccgtggggccagggaaccctggtcaccgtctcctcag

SEQ ID NO: 5031 - DNA, 323 bp, Homo sapiens; identical to SEQ ID NO: 5016

SEQ ID NO: 5032 - DNA, 318 bp, Homo sapiens
  modified_base (3)..(8): a, c, t, g, unknown or other
  modified_base (65)..(66): a, c, t, g, unknown or other
  modified_base (143)..(144): a, c, t, g, unknown or other
  modified_base (155)..(156): a, c, t, g, unknown or other
  modified_base (163)..(163): a, c, t, g, unknown or other
  modified_base (175)..(176): a, c, t, g, unknown or other
  modified_base (194)..(194): a, c, t, g, unknown or other
  modified_base (207)..(208): a, c, t, g, unknown or other
  modified_base (213)..(213): a, c, t, g, unknown or other
  modified_base (219)..(219): a, c, t, g, unknown or other
  modified_base (239)..(239): a, c, t, g, unknown or other
  modified_base (307)..(307): a, c, t, g, unknown or other
ccnnnnnnagtctctgaggatctcctgtaagacttctggatacaggtttaccacctactggatcnnctgggtgcgccagatgcccgggaaaggcctggagtggatggggaggattgatcctactgactcttataccaactacnncccgtccttcnnaggccangtcaccttctcnnctgacaagtccatcagcnctgcctacctgcnntggcncacccngagggcctcggacaccgccntgtattactgtgcgagacaacgatcggagcatgactactggggccagggaaccctggtcaccgtctcntcagcctccac

SEQ ID NO: 5033 - DNA, 315 bp, Homo sapiens
agaccctgtccctcacctgcactgtctccggtggctccatcagcagttacttctggagctggattcggcagtccccagagacgggactggagtggattgggtatatcttgtatactgggagcaccaactacaacccctccctcaagggtcgggtcaccatttcagtagacacgtccaagaaccagttcttcctggagctgaactctgtgaccgccgcagacacggccgtttattactgtgcgagaccttcaagggagggatacctggattattttgatgtctggggccaagggacaatggtcaccgtctcttcag

SEQ ID NO: 5034 - DNA, 331 bp, Homo sapiens
aggtctcctgcaaggcttctggatacaccttcaccggctactatatgcactgggtgcgacaggcccctggacaagggcttgagtggatgggatggatcaaccctaacagtggtggcacaaactatgcacagaagtttcagggcagggtcaccatgaccagggacacgtccatcagcacagcctacatggagctgagcaggctgagatctgacgacacggccgtgtattactgtgcgacctcgaccttaaatatagtggctacgattggtccccattactactactacggtatggacgtctggggccaagggaccacggtcaccgtctcctc

SEQ ID NO: 5035 - DNA, 323 bp, Homo sapiens; identical to SEQ ID NO: 5016

SEQ ID NO: 5036 - DNA, 326 bp, Homo sapiens
ccttcggagaccctgtccctcacctgcactgtctctggtggctccatcagcagtagtagttactactggggctggatccgccagcccccagggaaggggctggagtggattgggaatatctattatagtgggagcacctactacaacccgtccctcaagagtcgagtcaccatatccgtagacacgtccaagaaccagttctccctgaagctgagctctgtgaccgccgcagacacggctgtgtattactgtgcgagacatctacgcggtgatttcgtcggacagtttgactactggggccagggaaccctggtcaccgtctcctc

SEQ ID NO: 5037 - DNA, 332 bp, Homo sapiens; identical to SEQ ID NO: 5017

SEQ ID NO: 5038 - DNA, 339 bp, Homo sapiens
tttcggagaccctgtccctcacctgcactgtctctggtggctccatcagcagtagtagttactactggggctggatccgccagcccccagggaaggggctggagtggattgggagtatctattatagtgggagcacctactacaacccgtccctcaagagtcgagtcaccatatccgtagacacgtccaagaaccagttctccctgaagctgagctctgtgaccgccgcagacacggctgtgtattactgtgcggggaaaacttacgatttttggagtggttatcctataaaggttgttgactactggggccagggaaccctggtcaccgtctcctcag

SEQ ID NO: 5039 - DNA, 329 bp, Homo sapiens
  modified_base (43)..(45): a, c, t, g, unknown or other
  modified_base (60)..(60): a, c, t, g, unknown or other
cctgtccctcacctgcactgtctctggtggctccatcagctgnnntggttactactgganctggatccgccagcacccagggaagggcctggagtggattgggtacatctattacagtgggagcacctactacaacccgtccctcaagagtcgagttaccatatcagtagacacgtctaagaaccagttctccctgaagctgagctctgtgactgccgcggacacggccgtgtattactgtgcgagagctcctgacgatttttggagtggttattgggggtactactttgactactggggccagggaaccctggtcaccgtctcctcag

SEQ ID NO: 5040 - DNA, 322 bp, Homo sapiens
  modified_base (23)..(23): a, c, t, g, unknown or other
  modified_base (119)..(119): a, c, t, g, unknown or other
cacctgcactgtctctggtggcnccatcagcagtagtagttactactggggctggatccgccagcccccagggaaggggctggagtggattgggagtatctattatagtgggagcaccnactacaacccgtccctcaagagtcgagtcaccatatccgtagacacgtccaagaaccagttctccctgaagctgagctctgtgaccgccgcagacacggctgtgtattactgtgcgagactgaagggggggtgggagctacttatctactactactactacatggacgtctggggcaaagggaccacggtcaccgtctcctca

SEQ ID NO: 5041 - DNA, 329 bp, Homo sapiens
ttcggagaccctgtccctcacctgcactgtctctggtggctccatcagcagtagtagttactactggggctggatccgccagcccccagggaaggggctggagtggattgggagtatctattatagtgggaacacctactacaacccgtccctcaagagtcgagtcaccatatccgtagacacgtccaagaaccagttctccctgaagctgagctctgtgaccgccgcagacacggctgtgtattactgtgcgagacggggggaaggctatagcagctcgtccagctttgactactggggccagggaaccctggtcaccgtctcctcag

SEQ ID NO: 5042 - DNA, 311 bp, Homo sapiens
cctgagactctcctgtgcagcctctggattcaccttcagtagctatggcatgcactgggtccgccaggctccaggcaaggggctggagtgggtggcagttatatcatatgatggaagtaataaatactatgcagactccgtgaagggccgattcaccatctccagagacaattccaagaacacggtgtatctgcaaatgaacagcctgagagctgaggacacggctgtgtattactgtgcgaaagattcggaaggctacgagtactactttgactactggggccagggaaccctggtcaccgtctcctcag

SEQ ID NO: 5043 - DNA, 311 bp, Homo sapiens
cctgagactctcctgtgcagcgtctggattcaccttcagtggctatgacatgcactgggtccgccaggctccaggcaaggggctggagtgggtggcacttatttgctttgatggaaagaataaatattatgcagacttcgtggagggccgattcatcatctccagagacaattctcagaatacgctgtttctgcaaatgcacagcctgagagccgaggacacggctgtatattactgtgggagagtggccggtgggacctactcttggtttgacttctggggccagggaaccctggtcaccgtctcctcag

SEQ ID NO: 5044 - DNA, 323 bp, Homo sapiens
cctgagactctcctgtgcagcctctggattcaccttcagtagctatagcatgaactgggtccgccaggctccagggaaggggctggagtgggtctcatccattagtagtagtagtagttacatatactacgcagactcagtgaagggccgattcaccatctccagagacaacgccaagaactcactgtatctgcaaatgaacagcctgagagccgaggacacggctgtgtattactgtgcgagtctacgggtggatacagctatggttacgtggggggatcaagactactggggccagggaaccctggtcaccgtctcctcag

SEQ ID NO: 5045 - DNA, 323 bp, Homo sapiens; identical to SEQ ID NO: 5016

SEQ ID NO: 5046 - DNA, 357 bp, Homo sapiens
tggggcctcagtgaatgtctcctgcaaggcttctggatacaccttcaccggctactatatgcactgggtgcgacaggcccctggacaagggcttgagtggatgggatggatcaaccctaacagtggtggcacaaactatgcacagaagtttcagggcagggtcaccatgaccagggacacgtccatcaccacagcctacatggacctgagcaggctgagatctgacgacacggccgtgtattactgtgcgagaattggtgttaagggggggtcctacgatttttggagtggttattatcccaacccaggtggatactttgactactggggccagggaaccctggtcaccgtctcctc

SEQ ID NO: 5047 - DNA, 360 bp, Homo sapiens; identical to SEQ ID NO: 4841

SEQ ID NO: 5048 - DNA, 258 bp, Homo sapiens; identical to SEQ ID NO: 4842

SEQ ID NO: 5049 - DNA, 316 bp, Homo sapiens; identical to SEQ ID NO: 4843

SEQ ID NO: 5050 - DNA, 272 bp, Homo sapiens; identical to SEQ ID NO: 4844
  modified_base (110)..(110): a, c, t, g, unknown or other

SEQ ID NO: 5051 - DNA, 338 bp, Homo sapiens
  modified_base (2)..(5): a, c, t, g, unknown or other
  modified_base (7)..(8): a, c, t, g, unknown or other
gnnnnannctgggaggtccctgagactctcctgtgaagcctctggattcatcttcagtagcttcgctatgcactgggtccgccaggctccaggcaaggggctggagtgggtggcactgatatcgtttgatggaggtcggacattctccgcagactccgtgaagggccgattcaccatctccagagacaattccaagaacacggtgtttctgcacatgaacagtctgagacctgcggacacggctgtgtatttctgtgcgagacaacgtggatacaactatggtgcgaagatgtactttgacttctggggccagggaatccgggtcaccgtctcctcag

SEQ ID NO: 5052 - DNA, 311 bp, Homo sapiens; identical to SEQ ID NO: 4846

SEQ ID NO: 5053 - DNA, 261 bp, Homo sapiens; identical to SEQ ID NO: 4847
  modified_base (6)..(6): a, c, t, g, unknown or other
  modified_base (26)..(26): a, c, t, g, unknown or other
  modified_base (28)..(29): a, c, t, g, unknown or other
  modified_base (66)..(66): a, c, t, g, unknown or other

SEQ ID NO: 5054 - DNA, 315 bp, Homo sapiens; identical to SEQ ID NO: 4848

SEQ ID NO: 5055 - DNA, 318 bp, Homo sapiens; identical to SEQ ID NO: 4849

SEQ ID NO: 5056 - DNA, 333 bp, Homo sapiens; identical to SEQ ID NO: 4850

SEQ ID NO: 5057 - DNA, 316 bp, Homo sapiens; identical to SEQ ID NO: 4851

SEQ ID NO: 5058 - DNA, 301 bp, Homo sapiens; identical to SEQ ID NO: 4852

SEQ ID NO: 5059 - DNA, 352 bp, Homo sapiens; identical to SEQ ID NO: 4853

SEQ ID NO: 5060 - DNA, 379 bp, Homo sapiens; identical to SEQ ID NO: 4854

SEQ ID NO: 5061 - DNA, 387 bp, Homo sapiens; identical to SEQ ID NO: 4855

SEQ ID NO: 5062 - DNA, 321 bp, Homo sapiens; identical to SEQ ID NO: 4856

SEQ ID NO: 5063 - DNA, 320 bp, Homo sapiens; identical to SEQ ID NO: 4857

SEQ ID NO: 5064 - DNA, 382 bp, Homo sapiens; identical to SEQ ID NO: 4858

SEQ ID NO: 5065 - DNA, 281 bp, Homo sapiens; identical to SEQ ID NO: 4859

SEQ ID NO: 5066 - DNA, 355 bp, Homo sapiens; identical to SEQ ID NO: 4860

SEQ ID NO: 5067 - DNA, 382 bp, Homo sapiens; identical to SEQ ID NO: 4861

SEQ ID NO: 5068 - DNA, 335 bp, Homo sapiens; identical to SEQ ID NO: 4862
  modified_base (9)..(9): a, c, t, g, unknown or other

SEQ ID NO: 5069 - DNA, 320 bp, Homo sapiens; identical to SEQ ID NO: 4863

SEQ ID NO: 5070 - DNA, 266 bp, Homo sapiens; identical to SEQ ID NO: 4864

SEQ ID NO: 5071 - DNA, 306 bp, Homo sapiens; identical to SEQ ID NO: 4865
  modified_base (51)..(51): a, c, t, g, unknown or other
  modified_base (63)..(63): a, c, t, g, unknown or other

SEQ ID NO: 5072 - DNA, 304 bp, Homo sapiens; identical to SEQ ID NO: 4866

SEQ ID NO: 5073 - DNA, 308 bp, Homo sapiens; identical to SEQ ID NO: 4867

SEQ ID NO: 5074 - DNA, 320 bp, Homo sapiens; identical to SEQ ID NO: 4868

SEQ ID NO: 5075 - DNA, 338 bp, Homo sapiens; identical to SEQ ID NO: 4869

SEQ ID NO: 5076 - DNA, 253 bp, Homo sapiens; identical to SEQ ID NO: 4870
  modified_base (10)..(10): a, c, t, g, unknown or other
  modified_base (12)..(13): a, c, t, g, unknown or other

SEQ ID NO: 5077 - DNA, 297 bp, Homo sapiens; identical to SEQ ID NO: 4871

SEQ ID NO: 5078 - DNA, 390 bp, Homo sapiens; identical to SEQ ID NO: 4872

SEQ ID NO: 5079 - DNA, 312 bp, Homo sapiens; identical to SEQ ID NO: 4873

SEQ ID NO: 5080 - DNA, 323 bp, Homo sapiens; identical to SEQ ID NO: 4874

SEQ ID NO: 5081 - DNA, 355 bp, Homo sapiens; identical to SEQ ID NO: 4875

SEQ ID NO: 5082 - DNA, 323 bp, Homo sapiens; identical to SEQ ID NO: 4876

SEQ ID NO: 5083 - DNA, 323 bp, Homo sapiens; identical to SEQ ID NO: 4877

SEQ ID NO: 5084 - DNA, 302 bp, Homo sapiens; identical to SEQ ID NO: 4878

SEQ ID NO: 5085 - DNA, 317 bp, Homo sapiens; identical to SEQ ID NO: 4879

SEQ ID NO: 5086 - DNA, 286 bp, Homo sapiens; identical to SEQ ID NO: 4880

SEQ ID NO: 5087 - DNA, 314 bp, Homo sapiens; identical to SEQ ID NO: 4881

SEQ ID NO: 5088 - DNA, 316 bp, Homo sapiens; identical to SEQ ID NO: 4882

SEQ ID NO: 5089 - DNA, 241 bp, Homo sapiens; identical to SEQ ID NO: 4883
  modified_base (17)..(18): a, c, t, g, unknown or other
  modified_base (53)..(53): a, c, t, g, unknown or other
  modified_base (57)..(57): a, c, t, g, unknown or other
  modified_base (84)..(84): a, c, t, g, unknown or other
  modified_base (89)..(91): a, c, t, g, unknown or other
  modified_base (99)..(99): a, c, t, g, unknown or other
  modified_base (104)..(104): a, c, t, g, unknown or other
  modified_base (107)..(107): a, c, t, g, unknown or other
  modified_base (111)..(111): a, c, t, g, unknown or other
  modified_base (130)..(130): a, c, t, g, unknown or other
  modified_base (141)..(141): a, c, t, g, unknown or other
  modified_base (147)..(147): a, c, t, g, unknown or other
  modified_base (151)..(151): a, c, t, g, unknown or other
  modified_base (167)..(167): a, c, t, g, unknown or other
  modified_base (169)..(169): a, c, t, g, unknown or other
  modified_base (215)..(215): a, c, t, g, unknown or other
  modified_base (235)..(235): a, c, t, g, unknown or other

SEQ ID NO: 5090 - DNA, 331 bp, Homo sapiens; identical to SEQ ID NO: 4884

SEQ ID NO: 5091 - DNA, 340 bp, Homo sapiens; identical to SEQ ID NO: 4885

SEQ ID NO: 5092 - DNA, 319 bp, Homo sapiens; identical to SEQ ID NO: 4886
  modified_base (11)..(11): a, c, t, g, unknown or other

SEQ ID NO: 5093 - DNA, 292 bp, Homo sapiens
tacaccttcaccacctactggctcggctgggtgcgccagatgcccggggaaggcctggagtggatggggatcatctatcctggtgactctcataccagatatagcccgtcattccaagggcaagtcaccctctctgccgacacgtccaccaacaccgcctacctgcactggttcagcctgaaggcctcggacaccgccatttactactgtgtgagacgtgagaggcccctccgttcagggagggctccttttgacacctggggccaagggacagcagtcgtcgtctcttcag

SEQ ID NO: 5094 - DNA, 231 bp, Homo sapiens; identical to SEQ ID NO: 4888

SEQ ID NO: 5095 - DNA, 276 bp, Homo sapiens; identical to SEQ ID NO: 4889

SEQ ID NO: 5096 - DNA, 217 bp, Homo sapiens; identical to SEQ ID NO: 4890

SEQ ID NO: 5097 - DNA, 317 bp, Homo sapiens; identical to SEQ ID NO: 4891

SEQ ID NO: 5098 - DNA, 309 bp, Homo sapiens; identical to SEQ ID NO: 4892
  modified_base (16)..(16): a, c, t, g, unknown or other

SEQ ID NO: 5099 - DNA, 324 bp, Homo sapiens; identical to SEQ ID NO: 4893

SEQ ID NO: 5100 - DNA, 317 bp, Homo sapiens; identical to SEQ ID NO: 4894

SEQ ID NO: 5101 - DNA, 291 bp, Homo sapiens; identical to SEQ ID NO: 4895

SEQ ID NO: 5102 - DNA, 314 bp, Homo sapiens; identical to SEQ ID NO: 4896

SEQ ID NO: 5103 - DNA, 312 bp, Homo sapiens; identical to SEQ ID NO: 4897
  modified_base (12)..(12): a, c, t, g, unknown or other
  modified_base (14)..(14): a, c, t, g, unknown or other
  modified_base (182)..(182): a, c, t, g, unknown or other

SEQ ID NO: 5104 - DNA, 314 bp, Homo sapiens; identical to SEQ ID NO: 4898

SEQ ID NO: 5105 - DNA, 313 bp, Homo sapiens; identical to SEQ ID NO: 4899
  modified_base (50)..(50): a, c, t, g, unknown or other

SEQ ID NO: 5106 - DNA, 314 bp, Homo sapiens; identical to SEQ ID NO: 4900

SEQ ID NO: 5107 - DNA, 330 bp, Homo sapiens; identical to SEQ ID NO: 4901

SEQ ID NO: 5108 - DNA, 310 bp, Homo sapiens; identical to SEQ ID NO: 4902

SEQ ID NO: 5109 - DNA, 340 bp, Homo sapiens
  modified_base (2)..(3): a, c, t, g, unknown or other
  modified_base (6)..(6): a, c, t, g, unknown or other
tnnctngagctcagtgaggtttcctgcaagacatctggatacaccttcaccagatactttatacattgggtgcgacaggcccctggacaggggcttgagtggatgggaatgatcaaccctcgtaatcctcgtggtggtagtacaagttacgcacagaacttacagggcagagtcaccttgaccagcgacacgtccacgagtacagtctacttggagctgagcagcctgaaatctgaggacacggccgtatatcactgtgcgagagatcgaggggatgttcttgtagctcagggagccatcgggtactggggccagggaaccctgctcaccgtctccttag

SEQ ID NO: 5110 - DNA, 332 bp, Homo sapiens
  modified_base (4)..(4): a, c, t, g, unknown or other
  modified_base (11)..(12): a, c, t, g, unknown or other
  modified_base (64)..(64): a, c, t, g, unknown or other
cgcngagcttnngaccctgtccctcacgtgcaatgtctctggaggctccatcaccaccggtagntattactgggcctggatccggcagcccgccgggaagggtctggagtgggttgggcgcattttcattactgggagcaccgactacaacccctccctcaagagtcgagtcaccatatcattagacacgtcgaagaaccagttctccctgaagctgacctctgtgaccgccgcagacacggccgtgtatttctgtgcgagattacactatagcaccacctggcactatttcgacccctggggccagggaaccctggtcaccgtctcctcag

SEQ ID NO: 5111 - DNA, 330 bp, Homo sapiens
  modified_base (2)..(2): a, c, t, g, unknown or other
gngcggggggtctgagactctcctgtgtagcctctggattcaccttcagtagttatgacatgaattgggtccgccaggctccagggaaggggctggagtggatttcatacattagtggtagtggtaatatcatatactacgcagactctgtgaagggccgattcaccatctccagagacaatgccaagaactcactatatctacagatgaacagcgtgagagacgacgacacggctctatattactgtgcgagagattcggaagctacaacgacacgggggaggtggttcgacccctggggccagggaaccctggtcaccgtctcctcag

SEQ ID NO: 5112 - DNA, 325 bp, Homo sapiens; identical to SEQ ID NO: 4906

SEQ ID NO: 5113 - DNA, 322 bp, Homo sapiens; identical to SEQ ID NO: 4907

SEQ ID NO: 5114 - DNA, 314 bp, Homo sapiens; identical to SEQ ID NO: 4908

SEQ ID NO: 5115 - DNA, 323 bp, Homo sapiens; identical to SEQ ID NO: 4909

SEQ ID NO: 5116 - DNA, 337 bp, Homo sapiens; identical to SEQ ID NO: 4910

SEQ ID NO: 5117 - DNA, 315 bp, Homo sapiens; identical to SEQ ID NO: 4911

SEQ ID NO: 5118 - DNA, 309 bp, Homo sapiens; identical to SEQ ID NO: 4912

SEQ ID NO: 5119 - DNA, 330 bp, Homo sapiens; identical to SEQ ID NO: 4913

SEQ ID NO: 5120 - DNA, 311 bp, Homo sapiens; identical to SEQ ID NO: 4914

SEQ ID NO: 5121 - DNA, 315 bp, Homo sapiens; identical to SEQ ID NO: 4915

SEQ ID NO: 5122 - DNA, 334 bp, Homo sapiens; identical to SEQ ID NO: 4916

SEQ ID NO: 5123 - DNA, 185 bp, Homo sapiens; identical to SEQ ID NO: 4917

SEQ ID NO: 5124 - DNA, 302 bp, Homo sapiens; identical to SEQ ID NO: 4918

SEQ ID NO: 5125 - DNA, 293 bp, Homo sapiens; identical to SEQ ID NO: 4919

SEQ ID NO: 5126 - DNA, 317 bp, Homo sapiens; identical to SEQ ID NO: 4920

SEQ ID NO: 5127 - DNA, 317 bp, Homo sapiens; identical to SEQ ID NO: 4921

SEQ ID NO: 5128 - DNA, 307 bp, Homo sapiens; identical to SEQ ID NO: 4922

SEQ ID NO: 5129 - DNA, 315 bp, Homo sapiens; identical to SEQ ID NO: 4923

SEQ ID NO: 5130 - DNA, 317 bp, Homo sapiens; identical to SEQ ID NO: 4924

SEQ ID NO: 5131 - DNA, 327 bp, Homo sapiens
  modified_base (2)..(4): a, c, t, g, unknown or other
tnnnctggagggtccctgagactctcctgcgcagcctctggattcaatttacatagttatgaaatgtattgggtccgccaggctccagggaaggggctggagtgggtctcattcattagtagtagaagtgatgccatctactacgcgggctccgtgcagggccgcttcaccatctccagaaacaacgccgcgaatacattgtatctgcaaatgaacagcctgagagtcgaggacacggctctttattactgtgcgagagatgccgggcgctttttggcctacggtatggacgtctggggccaagggaccacggtcaccgtctcctca

SEQ ID NO: 5132 - DNA, 257 bp, Homo sapiens; identical to SEQ ID NO: 4926

SEQ ID NO: 5133 - DNA, 292 bp, Homo sapiens; identical to SEQ ID NO: 4927
  modified_base (8)..(8): a, c, t, g, unknown or other
  modified_base (37)..(37): a, c, t, g, unknown or other

SEQ ID NO: 5134 - DNA, 321 bp, Homo sapiens; identical to SEQ ID NO: 4928

SEQ ID NO: 5135 - DNA, 320 bp, Homo sapiens; identical to SEQ ID NO: 4929

SEQ ID NO: 5136 - DNA, 304 bp, Homo sapiens
  modified_base (3)..(3): a, c, t, g, unknown or other
gangtttcctgcaaggcatctggatacaggctcaccaggtactacatgcactgggtgcgacaggcccctggacaagggcttgagtggatgggagtaatcgaccctagtggtggtggcaccacctacgcacagaagttccagggcagagtcaccatgaccagggacacgtccacgagcacagtcaacatgcagctgaccagcctgagatctgaggacacggccgtgtattactgtgcgaccttcagtcagggggggctacaaaatgactactggggccagggaaccctggtcaccgtctcctcag

SEQ ID NO: 5137 - DNA, 304 bp, Homo sapiens; identical to SEQ ID NO: 4931

SEQ ID NO: 5138 - DNA, 318 bp, Homo sapiens; identical to SEQ ID NO: 4932

SEQ ID NO: 5139 - DNA, 308 bp, Homo sapiens; identical to SEQ ID NO: 4933

SEQ ID NO: 5140 - DNA, 324 bp, Homo sapiens; identical to SEQ ID NO: 4934

SEQ ID NO: 5141 - DNA, 309 bp, Homo sapiens; identical to SEQ ID NO: 4935

SEQ ID NO: 5142 - DNA, 315 bp, Homo sapiens
  modified_base (4)..(4): a, c, t, g, unknown or other
  modified_base (6)..(6): a, c, t, g, unknown or other
  modified_base (8)..(8): a, c, t, g, unknown or other
  modified_base (10)..(10): a, c, t, g, unknown or other
atcngngncntctcctgcaagggttctggacgcaacttcaacaactttgctatcaactgggtgcgacaggcccctggacaagggcttgagtggatgggagggatcagccccatctttggagcagtgaaacacggacaggagttccagggcagagtcacgtttaccgcggacgttttcacgagcacagtttacatggagctgagcagcctgggatctgaggacacggccatttattattgtgcgagagggctcaattactattattatcatggaatggacgtctggggccaagggaccacggtcatcgtctcctca

SEQ ID NO: 5143 - DNA, 274 bp, Homo sapiens; identical to SEQ ID NO: 4937

SEQ ID NO: 5144 - DNA, 306 bp, Homo sapiens; identical to SEQ ID NO: 4938

SEQ ID NO: 5145 - DNA, 226 bp, Homo sapiens; identical to SEQ ID NO: 4939

SEQ ID NO: 5146 - DNA, 296 bp, Homo sapiens; identical to SEQ ID NO: 4940

SEQ ID NO: 5147 - DNA, 304 bp, Homo sapiens; identical to SEQ ID NO: 4941

SEQ ID NO: 5148 - DNA, 330 bp, Homo sapiens; identical to SEQ ID NO: 4942

SEQ ID NO: 5149 - DNA, 320 bp, Homo sapiens; identical to SEQ ID NO: 4943

SEQ ID NO: 5150 - DNA, 325 bp, Homo sapiens; identical to SEQ ID NO: 4944

SEQ ID NO: 5151 - DNA, 370 bp, Homo sapiens; identical to SEQ ID NO: 4945

SEQ ID NO: 5152 - DNA, 308 bp, Homo sapiens; identical to SEQ ID NO: 4946

SEQ ID NO: 5153 - DNA, 286 bp, Homo sapiens; identical to SEQ ID NO: 4947

SEQ ID NO: 5154 - DNA, 343 bp, Homo sapiens
  modified_base (9)..(9): a, c, t, g, unknown or other
aagcatgantctcggtgatgtctcctgcaaggcttcaggaggcaccttcaccaactatgctttcagctgggtgcgacaggcccctggacaagggcttgagtggatgggagggatcatccctatctttggtacaacaaactacgcacagaggttccagggcagagtcactattaccgcggacgaatccacgagtacagcttacatggagctgagcagcctgagatcggaagacacggccgtgtattactgtgcgagtagcagtggctggcccagcgaccgctatttccaccactactccgggttggacgtctggggccaagggaccacggtcaccgtctccgca

SEQ ID NO: 5155 - DNA, 314 bp, Homo sapiens
  modified_base (7)..(7): a, c, t, g, unknown or other
tcgaggnggagagtctctgaagatctcctgtcagggtttaggatacaattttgccggctactggttcggctgggtgcgccagaggcccggatacggcctggagtggatggggaccatctatcctggcgactcgtctactagatataatccgtcctttcaaggccaaatctccatctcagccgacgactccaccacgaccgcctacctgcagtggcccagcctgaaggcctcggacagcggcacctattattgtgcgggacatacaagcacgactaacttttggggccggggaaccctggtcaccgtctcctcgg

SEQ ID NO: 5156 - DNA, 306 bp, Homo sapiens; identical to SEQ ID NO: 4950

SEQ ID NO: 5157 - DNA, 255 bp, Homo sapiens; identical to SEQ ID NO: 4951
  modified_base (9)..(9): a, c, t, g, unknown or other
  modified_base (24)..(24): a, c, t, g, unknown or other
  modified_base (30)..(31): a, c, t, g, unknown or other
  modified_base (38)..(38): a, c, t, g, unknown or other
  modified_base (40)..(40): a, c, t, g, unknown or other
  modified_base (43)..(43): a, c, t, g, unknown or other
  modified_base (63)..(63): a, c, t, g, unknown or other
  modified_base (81)..(81): a, c, t, g, unknown or other
  modified_base (102)..(102): a, c, t, g, unknown or other
  modified_base (105)..(106): a, c, t, g, unknown or other
  modified_base (108)..(110): a, c, t, g, unknown or other
  modified_base (120)..(120): a, c, t, g, unknown or other

SEQ ID NO: 5158 - DNA, 337 bp, Homo sapiens; identical to SEQ ID NO: 4952

SEQ ID NO: 5159 - DNA, 373 bp, Homo sapiens; identical to SEQ ID NO: 4953

SEQ ID NO: 5160 - DNA, 339 bp, Homo sapiens; identical to SEQ ID NO: 4954
  modified_base (190)..(190): a, c, t, g, unknown or other

SEQ ID NO: 5161 - DNA, 308 bp, Homo sapiens; identical to SEQ ID NO: 4955
  modified_base (25)..(25): a, c, t, g, unknown or other
  modified_base (94)..(94): a, c, t, g, unknown or other
  modified_base (109)..(109): a, c, t, g, unknown or other
  modified_base (134)..(134): a, c, t, g, unknown or other
  modified_base (136)..(136): a, c, t, g, unknown or other
  modified_base (274)..(274): a, c, t, g, unknown or other
  modified_base (283)..(283): a, c, t, g, unknown or other

SEQ ID NO: 5162 - DNA, 322 bp, Homo sapiens; identical to SEQ ID NO: 4956

SEQ ID NO: 5163 - DNA, 361 bp, Homo sapiens; identical to SEQ ID NO: 4957

SEQ ID NO: 5164 - DNA, 354 bp, Homo sapiens; identical to SEQ ID NO: 4958

SEQ ID NO: 5165 - DNA, 339 bp, Homo sapiens; identical to SEQ ID NO: 4959

SEQ ID NO: 5166 - DNA, 330 bp, Homo sapiens; identical to SEQ ID NO: 4960

SEQ ID NO: 5167 - DNA, 191 bp, Homo sapiens; identical to SEQ ID NO: 4961

SEQ ID NO: 5168 - DNA, 315 bp, Homo sapiens; identical to SEQ ID NO: 4962

SEQ ID NO: 5169 - DNA, 361 bp, Homo sapiens; identical to SEQ ID NO: 4963

SEQ ID NO: 5170 - DNA, 303 bp, Homo sapiens; identical to SEQ ID NO: 4964

SEQ ID NO: 5171 - DNA, 299 bp, Homo sapiens; identical to SEQ ID NO: 4965

SEQ ID NO: 5172 - DNA, 338 bp, Homo sapiens; identical to SEQ ID NO: 4966

SEQ ID NO: 5173 - DNA, 343 bp, Homo sapiens; identical to SEQ ID NO: 4967

SEQ ID NO: 5174 - DNA, 357 bp, Homo sapiens; identical to SEQ ID NO: 4968

SEQ ID NO: 5175 - DNA, 275 bp, Homo sapiens; identical to SEQ ID NO: 4969
  modified_base (46)..(46): a, c, t, g, unknown or other
  modified_base (63)..(63): a, c, t, g, unknown or other
  modified_base (68)..(68): a, c, t, g, unknown or other
  modified_base (70)..(70): a, c, t, g, unknown or other
  modified_base (73)..(73): a, c, t, g, unknown or other

SEQ ID NO: 5176 - DNA, 369 bp, Homo sapiens; identical to SEQ ID NO: 4970

SEQ ID NO: 5177 - DNA, 378 bp, Homo sapiens; identical to SEQ ID NO: 4971

SEQ ID NO: 5178 - DNA, 384 bp, Homo sapiens; identical to SEQ ID NO: 4972

SEQ ID NO: 5179 - DNA, 343 bp, Homo sapiens
  modified_base (2)..(5): a, c, t, g, unknown or other
cnnnnggggctcaagtgatgtctcctgcaggcttctggatacaccttcaccggctactatatgcactgggtgcgacaggcccctggacaagggcttgagtggatgggatggatcaaccctaacagtggtggcaccaactatgcacacaagtttcagggcagggtcaccatgaccagggacacgtccatcagcacagcctacatggagctgagcaggctgagatctgacgacacggccatgtattactgtgcgagagccctctattactatgatagtagtggttttccagtcctctactactttgactactggggccagggaaccctggtcaccgtctcctcag

SEQ ID NO: 5180 - DNA, 363 bp, Homo sapiens; identical to SEQ ID NO: 4974

SEQ ID NO: 5181 - DNA, 311 bp, Homo sapiens; identical to SEQ ID NO: 4975

SEQ ID NO: 5182 - DNA, 331 bp, Homo sapiens; identical to SEQ ID NO: 4976

SEQ ID NO: 5183 - DNA, 326 bp, Homo sapiens; identical to SEQ ID NO: 4977

SEQ ID NO: 5184 - DNA, 328 bp, Homo sapiens; identical to SEQ ID NO: 4978

SEQ ID NO: 5185 - DNA, 343 bp, Homo sapiens; identical to SEQ ID NO: 4979

SEQ ID NO: 5186 - DNA, 333 bp, Homo sapiens; identical to SEQ ID NO: 4980
  modified_base (10)..(10): a, c, t, g, unknown or other
  modified_base (15)..(15): a, c, t, g, unknown or other

SEQ ID NO: 5187 - DNA, 326 bp, Homo sapiens; identical to SEQ ID NO: 4981

SEQ ID NO: 5188 - DNA, 309 bp, Homo sapiens; identical to SEQ ID NO: 4982

SEQ ID NO: 5189 - DNA, 315 bp, Homo sapiens; identical to SEQ ID NO: 4983

SEQ ID NO: 5190 - DNA, 317 bp, Homo sapiens; identical to SEQ ID NO: 4984

SEQ ID NO: 5191 - DNA, 311 bp, Homo sapiens; identical to SEQ ID NO: 4985

SEQ ID NO: 5192 - DNA, 331 bp, Homo sapiens; identical to SEQ ID NO: 4986

SEQ ID NO: 5193 - DNA, 326 bp, Homo sapiens; identical to SEQ ID NO: 4987

SEQ ID NO: 5194 - DNA, 350 bp, Homo sapiens; identical to SEQ ID NO: 4988

SEQ ID NO: 5195 - DNA, 348 bp, Homo sapiens
  modified_base (2)..(2): a, c, t, g, unknown or other
  modified_base (4)..(4): a, c, t, g, unknown or other
  modified_base (6)..(6): a, c, t, g, unknown or other
  modified_base (15)..(15): a, c, t, g, unknown or other
anantntgagcttcnagaccctgtccctcacctgcactgtctctggtggctccatcagcagtggtggttactactggagctggatccgccagcacccagggaagggcctggagtggattgggtacatctattacagtgggagcacctactacaacccgtccctcaagagtcgagttaccatatcagtagacacgtctaagaaccagttctccctgaagctgagctctgtgactgccgcggacacggccgtgtattactgtgcgagagattctaatgaggcagctcgagggtcggagtactggtacttcgatctctggggccgtggcaccctggtcactgtctcctcag

SEQ ID NO: 5196 - DNA, 344 bp, Homo sapiens
  modified_base (2)..(8): a, c, t, g, unknown or other
  modified_base (310)..(310): a, c, t, g, unknown or other
gnnnnnnngagtctctgaggatctcctgtaagggttctggatacagctttaccagctactggatcagctgggtgcgccagatgcccgggaaaggcctggagtggatggggaggattgatcctagtgactcttataccaactacagcccgtccttccaaggccacgtcaccatctcagctgacaagtccatcagcactgcctacctgcagtggagcagcctgaaggcctcggacaccgccatgtattactgtgcgagacaagattactatgatagtagtggttactccacggagtattacggtatggacgnctggggccaagggaccacggtcaccgtctcctca

SEQ ID NO: 5197 - DNA, 329 bp, Homo sapiens; identical to SEQ ID NO: 4991

SEQ ID NO: 5198 - DNA, 287 bp, Homo sapiens; identical to SEQ ID NO: 4992

SEQ ID NO: 5199 - DNA, 320 bp, Homo sapiens; identical to SEQ ID NO: 4993

SEQ ID NO: 5200 - DNA, 357 bp, Homo sapiens; identical to SEQ ID NO: 4994

SEQ ID NO: 5201 - DNA, 372 bp, Homo sapiens; identical to SEQ ID NO: 4995

SEQ ID NO: 5202 - DNA, 314 bp, Homo sapiens; identical to SEQ ID NO: 4996

SEQ ID NO: 5203 - DNA, 325 bp, Homo sapiens; identical to SEQ ID NO: 4997
  modified_base (51)..(51): a, c, t, g, unknown or other
  modified_base (55)..(55): a, c, t, g, unknown or other

SEQ ID NO: 5204 - DNA, 322 bp, Homo sapiens; identical to SEQ ID NO: 4998

SEQ ID NO: 5205 - DNA, 326 bp, Homo sapiens; identical to SEQ ID NO: 4999

SEQ ID NO: 5206 - DNA, 320 bp, Homo sapiens; identical to SEQ ID NO: 5000

SEQ ID NO: 5207 - DNA, 291 bp, Homo sapiens; identical to SEQ ID NO: 5001

SEQ ID NO: 5208 - DNA, 303 bp, Homo sapiens; identical to SEQ ID NO: 5002

SEQ ID NO: 5209 - DNA, 305 bp, Homo sapiens; identical to SEQ ID NO: 5003

SEQ ID NO: 5210 - DNA, 355 bp, Homo sapiens; identical to SEQ ID NO: 5004

SEQ ID NO: 5211 - DNA, 323 bp, Homo sapiens; identical to SEQ ID NO: 5005

SEQ ID NO: 5212 - DNA, 364 bp, Homo sapiens; identical to SEQ ID NO: 5006

SEQ ID NO: 5213 - DNA, 326 bp, Homo sapiens; identical to SEQ ID NO: 5007

SEQ ID NO: 5214 - DNA, 317 bp, Homo sapiens; identical to SEQ ID NO: 5008

SEQ ID NO: 5215 - DNA, 372 bp, Homo sapiens; identical to SEQ ID NO: 5009

SEQ ID NO: 5216 - DNA, 314 bp, Homo sapiens; identical to SEQ ID NO: 5010
  modified_base (43)..(43): a, c, t, g, unknown or other
  modified_base (80)..(80): a, c, t, g, unknown or other

SEQ ID NO: 5217 - DNA, 317 bp, Homo sapiens; identical to SEQ ID NO: 5011

SEQ ID NO: 5218 - DNA, 320 bp, Homo sapiens; identical to SEQ ID NO: 5012

SEQ ID NO: 5219 - DNA, 304 bp, Homo sapiens; identical to SEQ ID NO: 5013
  modified_base (107)..(107): a, c, t, g, unknown or other

SEQ ID NO: 5220 - DNA, 317 bp, Homo sapiens; identical to SEQ ID NO: 5014
  modified_base (54)..(54): a, c, t, g, unknown or other

SEQ ID NO: 5221 - DNA, 328 bp, Homo sapiens
  modified_base (2)..(2): a, c, t, g, unknown or other
  modified_base (8)..(8): a, c, t, g, unknown or other
  modified_base (10)..(10): a, c, t, g, unknown or other
gnaggctncngaccctgtcctcacctgcactgtctctggtggctccatcgacactgctgattattactggagttggatccgccagcacccagggaagggcctggactttattgggtacatctattacactgggagcaccttttatgccccgtcactcaggagccgtctgaccgtatcaatagacacgtctaacaaccacttctccctgaacctgacctctgtgactgccgcggacacggccgtctattactgtgcgagaggtctccgggaccccttatcgtggtacttggacgtctggggcaaagggaccacggtcaccgtctcttcc

SEQ ID NO: 5222 - DNA, 323 bp, Homo sapiens; identical to SEQ ID NO: 5016

SEQ ID NO: 5223 - DNA, 332 bp, Homo sapiens; identical to SEQ ID NO: 5017

SEQ ID NO: 5224 - DNA, 332 bp, Homo sapiens; identical to SEQ ID NO: 5017

SEQ ID NO: 5225 - DNA, 323 bp, Homo sapiens; identical to SEQ ID NO: 5016

SEQ ID NO: 5226 - DNA, 370 bp, Homo sapiens; identical to SEQ ID NO: 5020

SEQ ID NO: 5227 - DNA, 372 bp, Homo sapiens; identical to SEQ ID NO: 5021

SEQ ID NO: 5228 - DNA, 369 bp, Homo sapiens; identical to SEQ ID NO: 5022

SEQ ID NO: 5229 - DNA, 311 bp, Homo sapiens; identical to SEQ ID NO: 4985

SEQ ID NO: 5230 - DNA, 335 bp, Homo sapiens; identical to SEQ ID NO: 5024

SEQ ID NO: 5231 - DNA, 326 bp, Homo sapiens; identical to SEQ ID NO: 5025

SEQ ID NO: 5232 - DNA, 303 bp, Homo sapiens; identical to SEQ ID NO: 5026

SEQ ID NO: 5233 - DNA, 207 bp, Homo sapiens; identical to SEQ ID NO: 5027

SEQ ID NO: 5234 - DNA, 331 bp, Homo sapiens
cgttcggagaccctgtccctcacctgcactgtctctggtggctccatcagcagtagtagttactactggggctggatccgccagcccccagggaaggggctggagtggattgggagtatctattatagtgggaacacctactacaacccgtccctcaagagtcgagtcaccatatccgtagacacgtccaagaaccagttctccctgaagctgagctctgtgaccgccgcagacacggctgtgtattactgtgcgagacatggtgtagagtatagcacctcgtcgtgctttgactactggggccagggaaccctggtcaccgtctcctcag

SEQ ID NO: 5235 - DNA, 364 bp, Homo sapiens; identical to SEQ ID NO: 5029

SEQ ID NO: 5236 - DNA, 314 bp, Homo sapiens; identical to SEQ ID NO: 5030

SEQ ID NO: 5237 - DNA, 323 bp, Homo sapiens; identical to SEQ ID NO: 5016

SEQ ID NO: 5238 - DNA, 311 bp, Homo sapiens
  modified_base (3)..(8): a, c, t, g, unknown or other
  modified_base (65)..(66): a, c, t, g, unknown or other
  modified_base (143)..(144): a, c, t, g, unknown or other
  modified_base (155)..(156): a, c, t, g, unknown or other
  modified_base (163)..(163): a, c, t, g, unknown or other
  modified_base (175)..(176): a, c, t, g, unknown or other
  modified_base (194)..(194): a, c, t, g, unknown or other
  modified_base (207)..(208): a, c, t, g, unknown or other
  modified_base (213)..(213): a, c, t, g, unknown or other
  modified_base (219)..(219): a, c, t, g, unknown or other
  modified_base (239)..(239): a, c, t, g, unknown or other
  modified_base (307)..(307): a, c, t, g, unknown or other
ccnnnnnnagtctctgaggatctcctgtaagacttctggatacaggtttaccacctactggatcnnctgggtgcgccagatgcccgggaaaggcctggagtggatggggaggattgatcctactgactcttataccaactacnncccgtccttcnnaggccangtcaccttctcnnctgacaagtccatcagcnctgcctacctgcnntggcncacccngagggcctcggacaccgccntgtattactgtgcgagacaacgatcggagcatgactactggggccagggaaccctggtcaccgtctcntcag

SEQ ID NO: 5239 - DNA, 315 bp, Homo sapiens; identical to SEQ ID NO: 5033

SEQ ID NO: 5240 - DNA, 331 bp, Homo sapiens; identical to SEQ ID NO: 5034

SEQ ID NO: 5241 - DNA, 323 bp, Homo sapiens; identical to SEQ ID NO: 5016

SEQ ID NO: 5242 - DNA, 326 bp, Homo sapiens; identical to SEQ ID NO: 5036

SEQ ID NO: 5243 - DNA, 332 bp, Homo sapiens; identical to SEQ ID NO: 5017

SEQ ID NO: 5244 - DNA, 339 bp, Homo sapiens; identical to SEQ ID NO: 5038

SEQ ID NO: 5245 - DNA, 329 bp, Homo sapiens; identical to SEQ ID NO: 5039
  modified_base (43)..(45): a, c, t, g, unknown or other
  modified_base (60)..(60): a, c, t, g, unknown or other

SEQ ID NO: 5246 - DNA, 322 bp, Homo sapiens; identical to SEQ ID NO: 5040
  modified_base (23)..(23): a, c, t, g, unknown or other
  modified_base (119)..(119): a, c, t, g, unknown or other

SEQ ID NO: 5247 - DNA, 329 bp, Homo sapiens; identical to SEQ ID NO: 5041

SEQ ID NO: 5248 - DNA, 311 bp, Homo sapiens; identical to SEQ ID NO: 5042

SEQ ID NO: 5249 - DNA, 311 bp, Homo sapiens; identical to SEQ ID NO: 5043

SEQ ID NO: 5250 - DNA, 323 bp, Homo sapiens; identical to SEQ ID NO: 5044

SEQ ID NO: 5251 - DNA, 323 bp, Homo sapiens; identical to SEQ ID NO: 5016

SEQ ID NO: 5252 - DNA, 357 bp, Homo sapiens; identical to SEQ ID NO: 5046

SEQ ID NO: 5253 - DNA, 294 bp, Homo sapiens
aggtgcagctggtgcagtctggggctgaggtgaagaagcctgggtcctcggtgaaggtctcctgcaagacttctggaggcaccttcagcagctatgccatcagttgggtgcgacaggcccctggacaagggcttgagtggatgggagggatcatcggtatgtttggtacaacaaactacgcacagaagttccagggcagagtcacgattaccgcggacgaaatctcgagcacagcctacatggagctgagcagcctgagatctgaggacacggccgtctattattgtgcgagag

SEQ ID NO: 5254 - DNA, 188 bp, Homo sapiens
atcagctgggtgcgacaggcccctggacaaggacttcagtggatgggagggatcatccccagctttgccacaacaaaatatgcacaaaagtttcgggagagagtcataattaccgcggacgaatctacgaccactgcctacatggagctgggcggcctgacatctgacgacacggccgtgtatcactg

SEQ ID NO: 5255 - DNA, 233 bp, Homo sapiens
cctcacctgcgctgtctctggtgcctccatcagaaactactactggagctggatccggcagcccccagggaagggactggagtggattgggtctatctattacagtgggaatatctactacaacccctccctcaagagtcgtgtcaccttatcaatagacacgtccaagagccaggtctccctgaggctgagctctgtgaccgctgcggacacggccatgtattactgtgcga

SEQ ID NO: 5256 - DNA, 203 bp, Homo sapiens
  modified_base (110)..(110): a, c, t, g, unknown or other
ttatgccatgcactgggtccggcaagttccagggaagggcctggaatgggtctcaggtattagttggaatagcaattttctagattacgcggactctgtgaagggccggntcaccatctccagagacgacgccaagaactccctgtatctggaaatgaacagcctgagacttgaggacacggccttctattactgtgcaaaag

SEQ ID NO: 5257 - DNA, 262 bp, Homo sapiens
  modified_base (2)..(5): a, c, t, g, unknown or other
  modified_base (7)..(8): a, c, t, g, unknown or other
gnnnnannctgggaggtccctgagactctcctgtgaagcctctggattcatcttcagtagcttcgctatgcactgggtccgccaggctccaggcaaggggctggagtgggtggcactgatatcgtttgatggaggtcggacattctccgcagactccgtgaagggccgattcaccatctccagagacaattccaagaacacggtgtttctgcacatgaacagtctgagacctgcggacacggctgtgtatttctgtgcgaga

SEQ ID NO: 5258 - DNA, 245 bp, Homo sapiens
cctgagactctcctgtgcagcgtctggattcaccctcagtagttacggcatgcactgggtccgccaggctccaggcaaggggctggagtgggtggcacttatatggtttgatggaagtaataaatactatacagattccgtgaagggccgattcatcatctccagagaccattccaagaacacattgtatctgcaaatgaacagcctgagagccgaggacacggctgtgtatcactgtgcgagag

SEQ ID NO: 5259 - DNA, 175 bp, Homo sapiens
  modified_base (6)..(6): a, c, t, g, unknown or other
  modified_base (26)..(26): a, c, t, g, unknown or other
  modified_base (28)..(29): a, c, t, g, unknown or other
  modified_base (66)..(66): a, c, t, g, unknown or other
ccccangggagggactggagtggatngnngaaatcaatcaaagtggaagcaccacctataacccgnccctcaagagtcgcgtcaccttatcagtggacacgtccaagaaccagttctccctgaggttgacctctgtgaccgccgcggacacggctgtgtactactgtgtgagagg

SEQ ID NO: 5260 - DNA, 242 bp, Homo sapiens
tctcctgtgcagccactgggttcaccttcagtggctcttctattcactgggtccgccaggctcccgggaaagggctggagtgggttggccgtattcgaagcaaatacaacgatctcgcgacagcatacactgagtcggtgaaaggcaggttcaccatctccagagatgattcaaagaacacggcgtatctgcaaatgaacagcctgagaattgaggactcggccgtatattactgtactaga

SEQ ID NO: 5261 - DNA, 242 bp, Homo sapiens
tgagactgtcctgtgtagcctctggattcgccttcaatacgtatgctatgcactgggtccgccaggctccaggcaaggggctggagtgggtggcacttatgtcattttatggaaccacgacatacgaagcggactccgtgaagggccgattcaccatctccagagacaattccaagaacacgctgtatttacaaatgaacagcctgcgaccagaagacacggctgtgtatttctgtgccaga

SEQ ID NO: 5262 - DNA, 246 bp, Homo sapiens
cctgagactgtcctgcgcagcctctcgattcaacttcaataactatgccatgcactgggtccgccaggctccaggcaaggggctggagtgggtggcagttgtttcagctgatggaacttatacaaactatggagactccatgaagggccgagtcaccgtctccagagacaatctcaagaaaacgatgtatcttcagatcaatagcctcagacctgaggacacggctatgtactattgtgggaaaga

SEQ ID NO: 5263 - DNA, 233 bp, Homo sapiens
cctcacctgcactgtctctggtgcctccatcagaagttactactggagctggatccggcagcccccagggaagggactggagtggattgggtctatctattacagtgggaatatcaactacaacccctccctcaagagtcgtgtcaccttatcagtagacacgtccaagagccagttctccctgaagctgaactctgtgaccgctgcggacacggccatgtattactgtgcga

SEQ ID NO: 5264 - DNA, 218 bp, Homo sapiens
ggatacagcgtcaccagctattggatcggctgggtgcgccagatgcccgggaagggcctggagtggatgggggtcatccatcctggtaactccgaatccagatacagcccgtccttccaaggccaggtcaccatgtcagccgacaagtccattaataccgcctacctggagtggagcagcctgaaggcctcggacaccgccatgtattactgtgcgag

SEQ ID NO: 5265 - DNA, 296 bp, Homo sapiens
gaggtgcagctggtggagtctgggggaggctgggtccagccgggggggtccctgagactctcctgtgaagcctctgggttcacctttagtttgtattggatgggctgggtccgccaggctccagggaaggggctggagtgggtggccaccatgaaccaagatggaagtgataattattatgtggactctgtgaagggccgattcaccatctccagagacaacgccaagaactcactgtatctgcagatgaacagcctgagagccgaggacacggctgtctattattgtgcgagaga

SEQ ID NO: 5266 - DNA, 296 bp, Homo sapiens
caggtgcagctggtggagtctgggggaggcgtggtccggcctggggggtccctgagactctcctgtgaagcgtctggattcaccctcaataactatggcatgcactgggtccgccaggctccaggcagggggctggagtgggtggcagttatgtgggccggtggaagaaataggttctatgcagactccgtgaagggccgattcaccatctccagagacgattccaaaaacaccctgtctctgcaaatgcacagcctgagagccgaggacacgggggtctattactgtttgagaga

SEQ ID NO: 5267 - DNA, 295 bp, Homo sapiens
aggtgcagctggtgcagtctggggctgaggtgaagaagcctggggcctcagtgaaggtctcctgcaaggcctctggatacaccttcagaaattttgatatcaactgggtgcgacaggcccctggacaagggcttgagtggatgggatggatgaacccgaacaatggtgacacaggctatgcagagaaattccggggcagagtctccatgaccagggacacctccagaaacacagccttcatggagctgcgcggcctgacatctgaggacacggccatatattactgtgcgagagg

SEQ ID NO: 5268 - DNA, 239 bp, Homo sapiens
agatctcctgtaaggtttctggatacagctttaccagctactggatcggctgggtgcgccagatgcccggaaaaggcctggagtggatggggatcatctatcctgatgactcagataccaaatacagcccgaccttccaaggccaggtcaccatctcagccgacaagtccatcagcaccgcctacctgcagtggagcagcctgaaggcctcggacaccgccatgtattactgtgcgaga

SEQ ID NO: 5269 - DNA, 250 bp, Homo sapiens
gaccctgtccctcacctgtgctgtctctggtggctccatcagcagaggtggatttacctggagttggattcggcagccaccagggaaggccctggagtggattgggtacatctatcagagtggaagtacctactacagcccgtcgctcaagagtcgagtcaacatctcgttggacaagtctaataatcgcttcttcctgaatgtgatgtctgtgaccgccgcggacacggccgtctattactgtgccaga

SEQ ID NO: 5270 - DNA, 293 bp, Homo sapiens
gaggtgcagctggtggagtctgggggaggcttggtccagccgggggggtccctaagactcgcctgtacagcctctggatccatttttactattccttggatgggctgggtccgccaggctccagggaaggggctggagtgggtggccaacataaaccaagatggaagtgacacaacgtttctgggccctgtgaagggccgattcaccatctccagagacaacaccaagaactcagtgtttctgcaaatgaacgtcctgagagacgaggactcggctatctactactgtgcgag

SEQ ID NO: 5271 - DNA, 166 bp, Homo sapiens
ggaaggggctggagtggattggggaaatcaatcatagtggaagcaccaactacaacccgtccctcaagagtcgagtcaccatatcagtagacacgtccaagaaccagttctccctgaagctgagctctgtgaccgccgcggacacggctgtgtattactgtgcgag

SEQ ID NO: 5272 - DNA, 296 bp, Homo sapiens
gaggtgcagctggtggagtctggggggggcgtggtccagcctggggggtccctgagactctcctgtgcagcctctggattcacctttaataactattggatgagttgggtccgccagactccagggaaggggctggagtgggtggccaatataaagcaagatggaagtgagaaatactatgtggactctgtgaagggccgattcaccatgtccagggacaacgccaacaactcattgtatctgcaaatgagcaacctgagagccgaagacacggctatatattactgtgcgagaga

SEQ ID NO: 5273 - DNA, 293 bp, Homo sapiens
gaggtgcagctggtggagtctgggggaggcttggtccagccgggggggtccctgagactcgcctgtacagcctctggatccatcttcaatattccttggatgagctgggtccgccaaggtccagggaaggggctggagtgggtggccaacataaatcaagatggaagtgacacaacctttttgggctctgtggagggccgattcaccatctccagagacaacgccaggaactcagtgtttctgcaaatgagcgtcctgagagtcgaggacacggctacctactactgtgcgag

SEQ ID NO: 5274 - DNA, 247 bp, Homo sapiens
  modified_base (9)..(9): a, c, t, g, unknown or other
ctggggggnccctgagactctcctgttcagcctctggattcatctttagtcactatgccatgaactgggcccgccaggctccagggaaggggctggagtgggtctcaggtgtgagtactagtggtgatagaacagtctacgcagactccgtgaagggccggttcaccatctccagagacaattccaagaacacgctgtatctgcaaatgaacagcctgagagtcgaggacacggccctttattactg

SEQ ID NO: 5275 - DNA, 244 bp, Homo sapiens
cctgagactctcctgtgcggcctctggattcactttcagagacttctacatgagctggatccgccaggttccagggaagggactggagtgggtttcatacattagtggtagtggtaatgccaaataccacgcagactctgtgaggggccgcttcaccatctcccgggacaacgccaaggactcattgtttctgcaaatgaacaacctgagagtcgacgacacggccgtctattattgtgcgaga

SEQ ID NO: 5276 - DNA, 194 bp, Homo sapiens
ctggagctgggtccgacagcccccagggaagggacttgagtggcttggatatctctattacagtgggaccaccagctacaacccctccctcaagagtcgagtcaccatgtcagcagacacgtccaagaggcagttgtccctgaggttgacctctgtgacctctgcggacacggccgtgtattactgtgcgagag

SEQ ID NO: 5277 - DNA, 242 bp, Homo sapiens
  modified_base (51)..(51): a, c, t, g, unknown or other
  modified_base (63)..(63): a, c, t, g, unknown or other
gagactctcctgtgcaacctccggattcacgtttagtggctattggatganctgggtccgccnggctccagggaaggggctggagtgggtggccactataaagcgagatggaagtgcaaagtactacgtggactctgcgaagggccgattcaccatctcccgagacaacaccaagaactccgtggatctgcacatgagaagcctgacagtcgaggacacggccctgtattactgtgcgagag

SEQ ID NO: 5278 - DNA, 239 bp, Homo sapiens
aaggtttcttgcacggcatctggatacaccttcaacatgcactatatccactgggtgcgacaggcccctggacaaggccttgagtggatgggattcatcgaccctagtggtgacagcagaagttactcacagaaatttcagggcagagtcaccttgaccagtgacacgtccacgagcacagtctacatggaactgaggaccctgagatctgacgacacggccgtgttttactgcgcgag

SEQ ID NO: 5279 - DNA, 237 bp, Homo sapiens
aggtttcctgcaaggcttctggatacaccttcactacctattctatgaattgggtgcgacaggcccctggacaaggacttgagtggatgggatggatcaacacctacactgggaacccaacctatgcccaggccttcacaggacggtttgtcttctccttggacacctctgtcagtacggcgtttctgcagatcaccagcctcaaggctgacgacactgccatatattactgtgcga

SEQ ID NO: 5280 - DNA, 238 bp, Homo sapiens
cctgacactctcctgtgtaggctctggattcatcttcagtaactatgccatacactgggtccgccaggctccaggcaaggggctggactgggtgtcaggtgtaacagatgatgaatcttataaatcgtatgcaaactccgtgaagggccgatacaccatctccagagacaattccaggaacacggtgtatctgcacatggacagcctgagacctgaggacacggctatttattactgt

SEQ ID NO: 5281 - DNA, 245 bp, Homo sapiens
cctgagactctcctgtgaagcctctggattcacctttagcaactctgccatgagctgggtccgccaggctccagggaaggggctggagtgggtctcaagtattagtggtggtggtcatagcacatactacgcagactccgtgaagggccggttcagcatctccagagacaattccaagaacacgctgtatctgcaactgaacagcctgagagccgaagacacggccatattttactgtgtgaaag

SEQ ID NO: 5282 - DNA, 175 bp, Homo sapiens
  modified_base (10)..(10): a, c, t, g, unknown or other
  modified_base (12)..(13): a, c, t, g, unknown or other
cgccagcccncnnggaagggcctggagtggcttgcctacatccattacagtgggagcacctcctacagcccgtccctcaagagccgaattaccatgtcagtagacacgtccaagagtcagttctccctgaagttgaactcagtgactgccgcagacacggccgtgtattattgtg

SEQ ID NO: 5283 - DNA, 237 bp, Homo sapiens
tgagactctcctgtgcagcctctggattctcctttagtacttattggatgaactgggtccgccagattccagggaaggggctggagtgggtggccaacataaagcaagatggaagtgagaagtactatgtggactctgtgaagggccgattcaccatctccagagacaacgccaagaattcactgtatctgcaaatgaacagcctgagagtcgaggacacggctgtattttactgtg

SEQ ID NO: 5284 - DNA, 297 bp, Homo sapiens
caggtgcagctgcaggagtcgggcccaggcctggtgaagccttcggagaccctgtccctcatctgttctgtctctggtggctccgtcaccagtggcatttaccactggacctggattcgacagcccccagggaagggactggagtggattggatatatccattacagtgggagcacgttctacaacccctccctcaagagtcgcgtcaccatatcactgaacgcggccaagaatcacttctccctgaggctgagctctgtgaccgctgcggacacggccgtttattactgtgcgaga

SEQ ID NO: 5285 - DNA, 226 bp, Homo sapiens
ctgtctctggtgagtcgttaagcggctacttctggaactggattcgccagtccccagggaagggcctggagtggattggggagattagtcagagtagagtcaccacctacaacccgtccctcgggggtcgagtgtacttctcagtagacacgtccaagaaccagttctccctgaacctgaattctgtgaccgccgcggacacggctgtgtactactgtgcgagagg

SEQ ID NO: 5286 - DNA, 248 bp, Homo sapiens
ctcggtgagggtctcctgcaaggactctgaagacaccttcagcacctatgttatgcactgggtgcgacaggcccctggacaagggcttgagtggatgggagaactcgttcctgtttatggtacaccgaactatgcacaggccttccaggacagaatcaccattagcgcggacgagtccacgaacacggcctatttggaactgagcagcctcacatctgaagacacggccgtatattactgtgcgagag

SEQ ID NO: 5287 - DNA, 296 bp, Homo sapiens
gaggtgcagctggtggagtctgggggaggcttggtccggcctggggggtccctgagactctcctgtgcaccctctggattcacctttagtcactattgggtggcctggctccgccaggctccagaaaaggggctggagtggctggcccaaataaaccaagatggacgagagaagcactatgtggactctgtgaggggccgattcaccatctccagagacaacgccaagaactcactgtatctgcaaatgaacagcctgagagtcgaggacacggctctgtattactgttcgagaga

SEQ ID NO: 5288 - DNA, 248 bp, Homo sapiens
ctcggtgagggtctcctgcaagacttctgaagacaccttcagcacctatgttatgcactgggtgcgacaggcccctggacaagggcttgagtggatgggagaactcgttcctatttatgggacaccaaactatgcacaggccttccacgacagaatcaccattaccgcggacgagtccacgagcacggcctatttggaaatgaccagcctcacatctgaagacacggccgtatattactgtgcgagag

SEQ ID NO: 5289 - DNA, 246 bp, Homo sapiens
cctgagactctcctgtgcagcgtctggattcaccttcagtagttatggcatgcactgggtccgccaggctccaggcaaggggctggagtgggtgtcacttatatggtttgatggaggtactaaatactacgcagactccgtgaagggccgattcaccatctccagagacaactccaagaacacgctgtatctgcaaatgaacagcctgagagccgaggacacggctgtctattactgtgcgaaaga

SEQ ID NO: 5290 - DNA, 242 bp, Homo sapiens
cctcacctgcactgtgtctggtgcctccatcaccaatgctgattcttggtggaattggatccgccagtccccagggaagggcctggagtggattggctacatctattacagtggcaacacctactacaatccgtccctcaggagtcgggccagcatttcagtagacacgtccaagaacgagttcttcctgagtctgacttctgtgactgccgcagacacggccgtgtattactgtgccagag

SEQ ID NO: 5291 - DNA, 226 bp, Homo sapiens
cctctggattcagcttcagtaactatggcatgcactgggtccgccaggctccaggcaaggggctggagtgggtggcagttatatcacatgatggaagtaatgaagactatgcagactccgtcaagggccgattcaccatctcccgagacaattccaagaacaacctatatctgcaaatgaacaggctgagagctgaggacacggctgtatattactgtgcgaaaga

SEQ ID NO: 5292 - DNA, 227 bp, Homo sapiens
aaggcttctggatacaccttcaccggctattatgtacactgggtgcgacaggcccctggacaagggcttgagtggatgggatggatcaaccctaacagtggtggcacaaactatgcacagaggtttcagggcagggtcaccatgaccagggacacgtccttcagcacagtctacatggaggtgaacaggctgagatctgacgacacggccgtttactactgtgcgag

SEQ ID NO: 5293 - DNA, 246 bp, Homo sapiens
cctgagactctcctgttcagcctcaggattcacctttgacgattctgccattcactgggtccggcaacctccagggaagggcctggagtgggtctcaagtattagttggaatagtgataccatatactatgcggactctgtgaagggccggttcaccatctccagagacaacaccaagaactccctgtatctgcaaatgaccagtctgacaagtgaggacacggccctgtatttctgtgcaaagga

SEQ ID NO: 5294 - DNA, 244 bp, Homo sapiens
cctgagactctcatgtgcagcctctggattcacctttgagcattatgccatgcactgggtccgtcaagctccagggaagggtctggagtgggtctctcttatcactggggatggttctgacacgttctactcagactctgtgaagggccgattcaccatctccagagacaacaacaaaaactccctctatctgcaaatgtacagtctgtcatctgaggacaccgccctgtatttctgtgcaaaa

SEQ ID NO: 5295 - DNA, 166 bp, Homo sapiens
  modified_base (17)..(18): a, c, t, g, unknown or other
  modified_base (53)..(53): a, c, t, g, unknown or other
  modified_base (57)..(57): a, c, t, g, unknown or other
  modified_base (84)..(84): a, c, t, g, unknown or other
  modified_base (89)..(91): a, c, t, g, unknown or other
  modified_base (99)..(99): a, c, t, g, unknown or other
  modified_base (104)..(104): a, c, t, g, unknown or other
  modified_base (107)..(107): a, c, t, g, unknown or other
  modified_base (111)..(111): a, c, t, g, unknown or other
  modified_base (130)..(130): a, c, t, g, unknown or other
  modified_base (141)..(141): a, c, t, g, unknown or other
  modified_base (147)..(147): a, c, t, g, unknown or other
  modified_base (151)..(151): a, c, t, g, unknown or other
ggaaggggctggagtgnntttcatacattagtagccgtggtgatacgatatantacncagactctgtgaagggccgattcaccntctcnnnagacaacncccanaantcantgtatctgcaaatgaacancctgcaagccnaggacncggntgtttattactgtgc

SEQ ID NO: 5296 - DNA, 241 bp, Homo sapiens
agactctcctgtgcagcctctggactcatcttcagtaactactacatgagctggatccgccaggctccagggaaggggctggagggtgtttcctacattagtggcagtgctactatcatatactacgcagactctgtgaagggccgattcaccatctcccgggacaacccccggaactcactgtatctgcaaatgaacagcctgagagccgaggacacggccgtgtactactgtgcgagag

SEQ ID NO: 5297 - DNA, 248 bp, Homo sapiens
cctgagactctcctgtgcagcctctggattcacctttgatgattatgccatgcactgggtccggcaagctccagggaagggcctggagtgggtctcaggtattagttggaatagtggtagcagagtctatgcggactctgtgaagggccgattcaccatctccagagacaacgccaagacctccctgtatctgcaaatgaacagtctgagacctgaggacacggccttgtattactgtgtaaaagata

SEQ ID NO: 5298 - DNA, 239 bp, Homo sapiens
  modified_base (11)..(11): a, c, t, g, unknown or other
gagactctccngtgcagcctctggattcaccttcagagtctatggcttccactgggtccgccaggctccaggcaaggggctggagtgggtggcagctatatcatctgatggaagtaataaatactatgcagactccgtgaagggccgattcgtcatctccagagacaattccgagaacaccctttatctgcaaatggacagcctgagacctgaggacacggctgtatattactgtgcga

SEQ ID NO: 5299 - DNA, 217 bp, Homo sapiens
tacaccttcaccacctactggctcggctgggtgcgccagatgcccggggaaggcctggagtggatggggatcatctatcctggtgactctcataccagatatagcccgtcattccaagggcaagtcaccctctctgccgacacgtccaccaacaccgcctacctgcactggttcagcctgaaggcctcggacaccgccatttactactgtgtgagac

SEQ ID NO: 5300 - DNA, 154 bp, Homo sapiens
tgggtggcagtaatatcatctgatggaagtaataaatactatgccgactccgtgaagggccgattcaccatctccagagacaattccaagaacacgctgtatctgcaaatgaacagcctgagatctgaggacacggctgtgtattcctgtgcga

SEQ ID NO: 5301 - DNA, 194 bp, Homo sapiens
tactgtggctggatccgccagccccccgggaagggactggagtgggttggaagtatcgattacactgggaacacctactacaacccgtccctcaagagtcgagtcaccatatccgaagacacgtccaagaatcagttctccctgaagatgacctctgtgaccgccgcagacacggctgtttactactgtgcgag

SEQ ID NO: 5302 - DNA, 134 bp, Homo sapiens
ggtagtaccatatactacgcagactctgtgaagggccgattcaccatctccagagacaacgccaagaaatcagtgtacctggaaatgaacagcctgagagccgaggacacggctgtttattactgtgcgagaga

SEQ ID NO: 5303 - DNA, 248 bp, Homo sapiens
cctgagactctcctgtgcagcctctggattcacctttaatgattatgccatgcactgggtccggcaagctccacggaagggcctggagtgggtctcaactgttaattggaatagtggtgacatcggctatgcggactctgtgaagggccgattcaccatctccagagacaacgccaagaagtccctgtttctgcaaatgaacagtctgagacctgaggacacggccttctattattgtgtaaaacata

SEQ ID NO: 5304 - DNA, 245 bp, Homo sapiens
  modified_base (16)..(16): a, c, t, g, unknown or other
tgagactctcctgtgnagcctctggattcatctttgatgattatgccatgtactgggtccggcaagctccagggaagggcctggagtgggtcgcaggtatcaattggaaaagtaataacctaggctatgcggactctgtgaagggccgattcaccatctccagagacagcgccaagaagtccctttatctgcaaatgaacagtctgagaagtgaggatacggccacttattactgtgcaaaagat

SEQ ID NO: 5305 - DNA, 254 bp, Homo sapiens
gctggggggtcctgagactctcctgtgcagcctctggattcatcttcactagctattggatgcactgggtccgccaagctccagggaaggggctggtgtgggtctcacgtattaagagtgatgggagggacataagctacgcggactccgtgaagggccgattcaccgtctccagagacaacgccaagaatacggtgtatctgcaaatgaacagtctgagagccgaggacacggctgtctattactgtgcaaga

SEQ ID NO: 5306 - DNA, 248 bp, Homo sapiens
cctgagactctcctgtgcagcctctggattcagttttgaggaatatggcatgcactgggtccggcaagctccagggaagggcccggagtgggtctcatttattaattggaacagtggtgacatagggtatgcggactctgtggaggggaggttcaccatctccagagacaacgccaagaactccttgtttctgcaaatgaacagtctgagaactgaggacacggccttgtattattgtgtaaaacata

SEQ ID NO: 5307 - DNA, 198 bp, Homo sapiens
gcagctttgctatcagctgggtgcgacaggcccctggacaagggcttgaatggatgggaggcatcaccgctatgtttggcacagcgttctacgcacagaggttccaggatagactcaccattaccgcggacaaacccacggacaaattcatgagcacagtttccatggagctgaggagcctgacatctgaggacacgg

SEQ ID NO: 5308 - DNA, 246 bp, Homo sapiens
cctgagactctcctgtgcagcctctggattcagcttcagtagctatggcatgcactgggtccgccaggctccaggcaaggggctggagcctgtggcaattatagcctatgatggaagtaataagtactatgcagactccgtgaggggccggttcaccgtctccagagacaattccaagaacacgctgtatctgcaaatgaacagcctgagaactgaagacacggctgtgtattactgtgcgaaaga

SEQ ID NO: 5309 - DNA, 244 bp, Homo sapiens
  modified_base (12)..(12): a, c, t, g, unknown or other
  modified_base (14)..(14): a, c, t, g, unknown or other
  modified_base (182)..(182): a, c, t, g, unknown or other
ccctcacctgcncngtctctggtgactccatcagcagtggtggctactactggaactggatccgccagtccccagggaagggccttgagtggattgggtacatctatttcactgggaagaccaactacaacccgtccctcaagagtcgagttaccatatcagtggatccgtctaagacgcanttctcgctgaagctgacctctgtgacggccgcggacacggccgtctattactgtgcgagaga

SEQ ID NO: 5310 - DNA, 246 bp, Homo sapiens
cctgagactctcctgttcagcctctggattcacctttgacgatgctgccatgcactgggtccggcatcgtccagggaagggcctggagtgggtctcaagtattagttggaatagcgataccatacactatgcggactctgtgaagggccggttcaccatctccagagacaacgccaagaattccgtgtatctgcaaatgagcaggctgacaagtgaggacacggccctgtatttctgtgcaaaaga

SEQ ID NO: 5311 - DNA, 246 bp, Homo sapiens
  modified_base (50)..(50): a, c, t, g, unknown or other
cctgagactctcctgtgttgcctctggcttcacttttagtaaatatggcntagactgggtccgccaggctccagggaaggggctggagtgggtctcaggaattagtgctagcggtggtcgcacatactacgcagactccgtgaagggccgcttcaccatctccagagacaattccagagacaccttctttctgcaaatgaacagcctgagaaacgacgacacggccatttattattgtacgagaga

SEQ ID NO: 5312 - DNA, 241 bp, Homo sapiens
cctcacctgcactgtctctggtggctccatcagtggtggtaattactactggacctggatccggcagcccgccgggaagggactggagtggattgggcgtatctatcccagtgggagcaccaactacaacccctccctcaagagtcgagtcaccatatcagtagacacgtccaagaaccacttctccctaaatttgagctctgtgaccgccgcagacacggccgtctattactgtgcgaga

SEQ ID NO: 5313 - DNA, 242 bp, Homo sapiens
tgagactctcctgtgcagcgtctggattcactttcagtagcgatggcatgcactgggtccgccaggctccaggcaaggggctggagtgggtggcttttatacggtatgatggaagtaagaaatactatgctgactccgtgaagggccgattcaccatctccagagacaattccaagagctcgctgtatctgcaaatgaacagcctgagaactgacgacacggctgtgtattattgtgcgaaa

SEQ ID NO: 5314 - DNA, 244 bp, Homo sapiens
cctgagactctcctgtgcagcctctggattcacattcagtgactactacatgagttggatccgccaggctcctgggaaggggccggagtggatttcatccattagtagcagttctactaccaaatcctacgcagactctgtgaagggccgattcaccatctccagggacaacgcccagaactcattgtttctccatatgaacagcctgagggccgacgacgcggctgtatatttctgtgcgcga

SEQ ID NO: 5315 - DNA, 266 bp, Homo sapiens
  modified_base (2)..(3): a, c, t, g, unknown or other
  modified_base (6)..(6): a, c, t, g, unknown or other
tnnctngagctcagtgaggtttcctgcaagacatctggatacaccttcaccagatactttatacattgggtgcgacaggcccctggacaggggcttgagtggatgggaatgatcaaccctcgtaatcctcgtggtggtagtacaagttacgcacagaacttacagggcagagtcaccttgaccagcgacacgtccacgagtacagtctacttggagctgagcagcctgaaatctgaggacacggccgtatatcactgtgcgagaga

SEQ ID NO: 5316 - DNA, 262 bp, Homo sapiens
  modified_base (4)..(4): a, c, t, g, unknown or other
  modified_base (11)..(12): a, c, t, g, unknown or other
  modified_base (64)..(64): a, c, t, g, unknown or other
cgcngagcttnngaccctgtccctcacgtgcaatgtctctggaggctccatcaccaccggtagntattactgggcctggatccggcagcccgccgggaagggtctggagtgggttgggcgcattttcattactgggagcaccgactacaacccctccctcaagagtcgagtcaccatatcattagacacgtcgaagaaccagttctccctgaagctgacctctgtgaccgccgcagacacggccgtgtatttctgtgcgaga

SEQ ID NO: 5317 - DNA, 256 bp, Homo sapiens
  modified_base (2)..(2): a, c, t, g, unknown or other
gngcggggggtctgagactctcctgtgtagcctctggattcaccttcagtagttatgacatgaattgggtccgccaggctccagggaaggggctggagtggatttcatacattagtggtagtggtaatatcatatactacgcagactctgtgaagggccgattcaccatctccagagacaatgccaagaactcactatatctacagatgaacagcgtgagagacgacgacacggctctatattactgtgcgagaga

SEQ ID NO: 5318 - DNA, 243 bp, Homo sapiens
cctgagactctcctgtgcagcgtctggtttcaccttcagtagttatggcatgcactgggtccgccaggctccaggcaaggggctggagtgggtggcatttgtacggtatgatggaagtaatatatgctatgcagcctccgtgaagggccgattcaccatctccagagacaattccaagaacacggtatatctgcaaatgaacagcctgagagctgacgacacggctgtgtattactgcgcgaa

SEQ ID NO: 5319 - DNA, 237 bp, Homo sapiens
agactctcctgtgcagcctctggattcacctttagcacctatgccatgtcctgggtccgccaggctccagggaaggggctggagtgggtctcaactatcactggtaacggtaggacattctacgcggactccgtgaagggccacttcaccatctccagagacaattccaaaaacatgctctatctacaaatgaacagcctgagagccgaggacacggccgtgtattattgtgcgaaa

SEQ ID NO: 5320 - DNA, 241 bp, Homo sapiens
tgagactctcctgtgcagcctctgggttcgcctttagcaattatgtcatggcctgggtccgccaggctccagggaaggggctggagtgggtctcaaatattgttgggagtggtgatagcacatactacgcagactccgtgaagggccggttcagtatctccagagacaattccaacaatacgctgactctgcaaatgcacagcctgagagccgaggacacggccatctattactgtacgaa

SEQ ID NO: 5321 - DNA, 244 bp, Homo sapiens
cctgagactctcctgtgcagcctctggattcacttttagtcgttattggatgagctgggtccgccagactccagggaaagggttggagtgggtggccaacatagacgaagatggaagagacaaatattatgtggactctgtgaagggccgattcagcatctccagagacaacgccaagaactcattacatttgcaaatgagtaacctgagagccgaggacacggctgtatattactgtgcgaga

SEQ ID NO: 5322 - DNA, 252 bp, Homo sapiens
cctgagactctcctgtacagcctctggattcacctttggtgattatgctttgagctgggtccgccaggctccagggaaggggctggagtgggtaggtttcattagaagcaaagcttatggtgggacaacagaatacgccgcgtctgtgaaaggcagattcaccatctcaagagatgattccaaaagcatcgcctatctgcaaatgaacagcctgaaaaccgaggacacagccgtgtattattgtactagaga

SEQ ID NO: 5323 - DNA, 238 bp, Homo sapiens
cctcacctgcactgtctccagttactccatcaccagtggttactactggggctgggtccggcagcccccagggaaggggctggagtggattgcaagtatctatcatagtgggagcacctactacaacatgtccctcaagagtcgagtcaccatatcagtagacacgtccaagaaccagttctccctgaagctgacctctgtgaccgccgcagacacggccgtttactactgtgcgaga

SEQ ID NO: 5324 - DNA, 239 bp, Homo sapiens
aggtctcctgcaaggcttctggttacacttttaccagttatggtatcagctgggtgcgacaggcccctggacaagggcttgagtggatgggatggatcagcactaagaatgttaacacaaactatgcacagaaactccagggcagagtcaccatgaccgcagacacatccacgagcacagcctatatggacttgaggaccttgagatccgacgacacggccgtctatttctgtgcgaga

SEQ ID NO: 5325 - DNA, 241 bp, Homo sapiens
aggtctcctgcgaggcttctggatacaggttcaccgactactatatagtctggatgcgacaggcccctggacaagggcttgagcgaatgggacggatcaaccctcagagcggtggcacagacgttccacagaagtttcagggcacggtcaccctgaccagggacacgtccatcagcacagcctacatggaactgagcagtctaagatctgacgacacggccctttatttttgtgcgagaga

SEQ ID NO: 5326 - DNA, 236 bp, Homo sapiens
cctcacctgcactgtctctggtgcctccatcagtagttactactggaattggatccggcagcccccagggaagggactggagtggattggttatatctatcacactgggagcaccaactccaacccctccctcaagagtcgagtcaccatatcagtagacacgtccaagaaccagttctccctgaagctgagctctgtgaccgctgcggacacggccgtgtattactgtgcgagag

SEQ ID NO: 5327 - DNA, 252 bp, Homo sapiens
cttcggggaccctgtccctcacctgcgctgtgtctggcgcctccgtcactagtaacaattggtggatctgggtccgccagccccccgggaaggggctagagtggattggggaaatctggcatagtgggaggaccaattacaattcgtccctcaagagtcgactcagcatttcagtagacatcttcaagcaccagttctccctgaatttgaactctctgaccgccgcggacacggccgtgtattactgtgcga

SEQ ID NO: 5328 - DNA, 242 bp, Homo sapiens
cctcacgtgcattgtctctggtgactccatcattacgagcacttactactggggctggatccgtcagtccccagggaaggggctggagtggattggcagtattaattctggcgggagaacgacttacggtccgtccctcgacggtcgagtcaccatgtccgtagacacgtccaacaaccaattgtccctcaaactgaggtctgtgaccgccgcagacacggctgtatattactgtgcgagac

SEQ ID NO: 5329 - DNA, 126 bp, Homo sapiens
ccatatactacgcagactctgtgaagggccgattcaccatctccagagacaatgccaagaactcactgtatctgcaaatgaacagcctgagagccgaggacacggctgtgtattactgtgcgagag

SEQ ID NO: 5330 - DNA, 239 bp, Homo sapiens
gagactctcctacgaagtctctggattcaccgtcagtagtaacttcatgagttgggtccgccgggctccagggaaggggctggaatgggtgtcagttatttatagtggtggtggcacatactacggagactccgtgaagggccgattcaccatctccagagacacttcgaggaactcactgtctcttcaaatgaacagcctgagtgtcgaagacacgggcatatattattgtgcgagag

SEQ ID NO: 5331 - DNA, 245 bp, Homo sapiens
cctgagactctcctgtgcagcctctggatttattttcagtgaatattggatgcagtgggtccggcagaccccagggaaggggctggagtgggtggccaacatacaccctggtggaaatgagagatatcatgtggactctgtgaggggccgattcaccatctccagagacaacgccaagaactcactgtatttgcaaatgaacagcctgagagccgaggacacggctatatattactgtacgagag

SEQ ID NO: 5332 - DNA, 238 bp, Homo sapiens
cctcacctgcgctgtctctggtagctccatcagcaggggttactactgggcctggatccggcagcccccagggaaggggctggagtggattgggagtatctatcatagtgtgaacacctactacaacccgtccctcaagagtcgagtcaccgtgtcagtagacacgtccaagaaccagttgtccctgaggctgacctctgtgaccgccgcagacacggccatgtattactgtgcgaga

SEQ ID NO: 5333 - DNA, 246 bp, Homo sapiens
ccttagactctcctgtgttggctctggattcactttccattatgcctggatgagttgggtccgccacagtccagggaaggggctggagtgggttggccgcgtgaagagccagagtgatggtggggcagcagactatggtgccgccgtgaaaggcagattcaccatctcaagagatgactcaaaaaacacggtctttctgcaaatgaacagcctgaggaccgaagacacaggcgtttattattgtac

SEQ ID NO: 5334 - DNA, 239 bp, Homo sapiens
aggtctcctgcaagggttctggaggcagcttcaataattttgctatcaactgggtgcgacaggcccctggacaagggcttgagtggatgggagggatcagccctatctttggagcagtacaccacgcacagaagttccagggcagagtcacgattaccgcggacattttcacgagcacagcctacatggagctgagcagcctgggatctgaggacacggccatttattattgtgcgaga

SEQ ID NO: 5335 - DNA, 247 bp, Homo sapiens
ctcggtgagggtctcctgcaagggttctggaggcgacttcaacaactttgctatcaactgggtgcgacaggcccctggacaagggcttgagtggatggggggaatcagcccaatttttggaggagttaagcacgcacagaagtttcagggcagggtcacgatcaccgcggacattttcgcgcgcacagtctatatggacctgagcaacctgggatctgatgacacggccatttatttctgtgcgaga

SEQ ID NO: 5336 - DNA, 241 bp, Homo sapiens
gagactctcctgtgcagcctctggattcacctttagcacgtatgccatgagctgggtccgccaggctccagggaaggggctggagtgggtctcaggaattagtggaagtggtgatgacacctactacgcagactccgtgaagggccggttcaccatctccagagacaattccaagaacacggtgtatctggaaatgagtagcctgagagccgaggacacggccgtatatttctgtgcgaaa

SEQ ID NO: 5337 - DNA, 260 bp, Homo sapiens
  modified_base (2)..(4): a, c, t, g, unknown or other
tnnnctggagggtccctgagactctcctgcgcagcctctggattcaatttacatagttatgaaatgtattgggtccgccaggctccagggaaggggctggagtgggtctcattcattagtagtagaagtgatgccatctactacgcgggctccgtgcagggccgcttcaccatctccagaaacaacgccgcgaatacattgtatctgcaaatgaacagcctgagagtcgaggacacggctctttattactgtgcgagaga

SEQ ID NO: 5338 - DNA, 213 bp, Homo sapiens
tcaccttcactgacttctacatgacatggatccgccagggtccaggcgaggggctggagtggatctcatacatgaacagcggtggaagtgtcatcaggtacgcggactctgtgaagggccgattcaccatctacagggacaacgccaagaagtcagtgcatctggagatgaacagcctgcgacccgacgacacggccgtctattactgtgcga

SEQ ID NO: 5339 - DNA, 231 bp, Homo sapiens
  modified_base (8)..(8): a, c, t, g, unknown or other
  modified_base (37)..(37): a, c, t, g, unknown or other
tgtgcagnctctggattcactttcaccaacgcctggntgaactggatccgccaggctccagggaaggggctggagtgggttgcccgtattaaaagaaaaattgagggtgaggcaacagactacgctgcacccgtgaaaggcagattcaccatttcaagagatgattcaagatataccgtgcatctgcaaatggacagcctgaaaagcgaggacacagccgtttattactgt

SEQ ID NO: 5340 - DNA, 245 bp, Homo sapiens
tcggtgagggtctcctgcaaggcttctggagccatcttcaacaactatgctatcggctgggtgcggcaggcccctggacaagggcttgagtggatgggacagagcatccctctccttggaacaacaaaatacgcacacaaattccagggcagagtcacaattaccgccgaggattcagggagcacaacctacttggacctgagccgcctgaattttgacgacacggccgtctactactgtgtgag

SEQ ID NO: 5341 - DNA, 246 bp, Homo sapiens
cctgagactctcctgtgcagtctctggtttccccttcaataactttgccatgcactgggtccgccaggctccagggaaggggctgcagtgggtctcctccattactagtagtagtaatgacatatactacgcagactcagtgaagggccgattcaccatctccagagacaacgccaagaactcactgtttctgcaaatgaacagcctgagaaccgacgacacggctgtgtattactgtgcgagaga

SEQ ID NO: 5342 - DNA, 238 bp, Homo sapiens
  modified_base (3)..(3): a, c, t, g, unknown or other
gangtttcctgcaaggcatctggatacaggctcaccaggtactacatgcactgggtgcgacaggcccctggacaagggcttgagtggatgggagtaatcgaccctagtggtggtggcaccacctacgcacagaagttccagggcagagtcaccatgaccagggacacgtccacgagcacagtcaacatgcagctgaccagcctgagatctgaggacacggccgtgtattactgtgcga

SEQ ID NO: 5343 - DNA, 242 bp, Homo sapiens
cctgagactctcctgtgcagcctctggattcacctttagtacctattggatgaagtgggtccgccaggctccagggaaggggcttgagtgcgtggccaacatagagcccgatggaagtcagagatggcatgtggactctgtgaagggccgattcaccatctccagagacaacgccaagaactcactgtatctgcaaatgaacagcctgagaggcgaggacacggctatgtattactgtgcga

SEQ ID NO: 5344 - DNA, 242 bp, Homo sapiens
cctgagactctcctgtacagcctctggattcagcttcagtgattctgaaatgaactgggtccgccaggctccagggaaggggctggagtgggttgcatatatttttgctagtggttctaccttattctacgcagactctgtgaagggccgattcaccatctccagagacaacgccaagaactcactctatctgcaaatgaacagcctgagaggcgaggacacggctgtctattactgtgcga

SEQ ID NO: 5345 - DNA, 237 bp, Homo sapiens
cctcacctgcactgtctttggtggctccatcagtactcactattggagttggatccggcagaccccagggaaggggctggaatgcattggctatatctctgacagcgggaggaccaattacaatccctccctcaagagtcgagtcaccatatcaatagacacgtccaagaaccagttctccctgaaattgaggtctgtgaccgctgcggacacggccgtctatttctgtgcgaggga

SEQ ID NO: 5346 - DNA, 241 bp, Homo sapiens
aggtctcctgcagggcttctgattacacctttaccagttatggtatcaactgggtgcgacaggcccctggacaagggcttgagtggatgggatggatcagcagttacaatgggaacaagcactatgtacagaagttccagggcagagtcaccatgaccacagacacatccacgaacacagcctacatggagttgaggagcctgagatctgacgacacggccgtgtattactgtgcgagaga

SEQ ID NO: 5347 - DNA, 244 bp, Homo sapiens
gtgagggtctcctgcaaggcttctggaggcgccttcaggaactttgctatcagctgggtgcgacaggcccctggacaagggcttgagtggatgggagggatcaccgctatctttgggacaacaaactacgcacagaagttccagggcagactcacgattaccgcggacgagtccacgagttcaacctacatggagctgagcagcctgagatctgaggacacggccgtgtattactgtgcgaaag

SEQ ID NO: 5348 - DNA, 247 bp, Homo sapiens
  modified_base (4)..(4): a, c, t, g, unknown or other
  modified_base (6)..(6): a, c, t, g, unknown or other
  modified_base (8)..(8): a, c, t, g, unknown or other
  modified_base (10)..(10): a, c, t, g, unknown or other
atcngngncntctcctgcaagggttctggacgcaacttcaacaactttgctatcaactgggtgcgacaggcccctggacaagggcttgagtggatgggagggatcagccccatctttggagcagtgaaacacggacaggagttccagggcagagtcacgtttaccgcggacgttttcacgagcacagtttacatggagctgagcagcctgggatctgaggacacggccatttattattgtgcgagag

SEQ ID NO: 5349 - DNA, 203 bp, Homo sapiens
tattggatgagctgggtccgccaggcaccagggaggaggccggagtgggtggccaagataaagcacgatggaagcgagaagtattatgtgggctctgtgcagggccgatttatcatctccaaagacaacgccaagaattttttgtatctgcaaatggaccgcctgagagccgatgacacggctgtctattactgtgcgagaga

SEQ ID NO: 5350 - DNA, 244 bp, Homo sapiens
tgagactctcctgtgcagtctctggactgagcttcagtgactacttcatgggctggatccgccaggctccagggaaggggccggagtggctttcatacataagtagtagtggttataccatcttctacgcagactctgtgaagggccgattcaccatctccagggacaactccaagaactcactttatttgcaaatgaacagcctgacagccgaggacacggccgtatattactgtgcgagaga

SEQ ID NO: 5351 - DNA, 145 bp, Homo sapiens
attagtggtagtggtacttacatatattacgcagactcagtgaggggccggttcaccatctccagagacaacgccaagacatcgctgtatctgcaaatgaacagcctgagagccgaggacacggctgtgtactactgtgcgagag

SEQ ID NO: 5352 - DNA, 240 bp, Homo sapiens
aggtctcgtgcaaggcttctggaggcaccttcaacaactttgcaatcaactgggtgcgacaggcccccggacaagggcttgagtggatgggagggatcagccctatatttggagcaggaaagcacgcacagaagttacagggcagagtcacgattaccgcggacgttttcacgagcacagtctacatggaactgggcagcctgagatctgaggacacggccacgtattattgtgcgagag

SEQ ID NO: 5353 - DNA, 248 bp, Homo sapiens
ctcggtgagggtctcctgcaagggttctggaggcgacttcaacaactttgctatcaactgggttcgacaggcccctggacaagggcttgagtggatgggaggtatcagtcctatttttggagcagtaaaacacgcacagaagttccagggcagactcaccattaccgcggacgtttttgtgaagacagcctacatggagctgagcagcctaggatttgaggacacggccatttattattgtgcgaaag

SEQ ID NO: 5354 - DNA, 245 bp, Homo sapiens
ctgagactctcctgcgcagcctctggattcgcctttagtagttatggcatgacttgggtccgccaggctccagggaaggggctggagtgggtctcggctattagcggtagcggtgggagtacatggtacgcagactccgtgaagggccggttcaccatctccagagacaattcccagagcacgctgtttctgcaaatgcacggcctgagagccgacgacacggccatatattattgtgcgaaaga

SEQ ID NO: 5355 - DNA, 244 bp, Homo sapiens
cctgagactctcctgtgcagcctctggattcaccttcaccacctctgccatgagttgggtccgccgggctccagggaaggggttggagtgggtctcaactattagtggtattggtgatactacatactacgctgactccgtgaagggccgcttcaccatctccagagacaactccaagaagtcgctgtatgtgcagttggacagtctgagagccgaggacacggccgtctattattgtgcgaaa

SEQ ID NO: 5356 - DNA, 246 bp, Homo sapiens
cctgagactctcctgtgcagcctctggattcagttttagtagttattggatgacctgggtccgccaggctccagggaaggggctggagtgggtggccaacatcaaccaagatggaagtgagaaagactatgtggactctgtgaagggccgattcaccatctccagagacaacgcccagaactcactgtttctgcaaatggacagcctgagagtcgaggacacggctctgtattattgtgcgagaga

SEQ ID NO: 5357 - DNA, 297 bp, Homo sapiens
gaggtgcagctggtggagtctgggggaggcttggtaaagccgggggggtcccttagagtctcctgtgcagcctctggattcacttttagtgccgcctggatgaactgggtccgccagactcctgggaaggggctggagtgggttggccgtatttggagcaaatctgatggtctgacaacacaatacgctgcacccgtgcaaggcagattcaccatctcaagagatgattcaaaaaatacactgtatctgcaaatgaacagcctgaaaaccgaggacacagccgtctattactgcacc

SEQ ID NO: 5358 - DNA, 243 bp, Homo sapiens
cctgagactctcctgtgcagcctctggattcatctttagtaattattggatgacctgggtccgccaggctccagggaaggggctggagggggtggccaacataaagcaagatgggagtgagacatactatgtggactctgtgaagggccgattcacgatctccagagacaacgcccagaactcactgtatctgcagatgaacagcctgagagccgaggacacggctgtgtatttctgtgcgag

SEQ ID NO: 5359 - DNA, 220 bp, Homo sapiens
tctggtggctccatgagtcctttttattggaactggatccggcagtccccaggaaagggactggaatggattggatatgtctactatgctgggggcaccaggtacaacccctccctcaagagtcgagtcaccataactgaagacacgtccaagaaccagttctccctgaagttgaggtctgtgacggccgcggacacggccgtctactactgtgcgagag

SEQ ID NO: 5360 - DNA, 255 bp, Homo sapiens
  modified_base (9)..(9): a, c, t, g, unknown or other
aagcatgantctcggtgatgtctcctgcaaggcttcaggaggcaccttcaccaactatgctttcagctgggtgcgacaggcccctggacaagggcttgagtggatgggagggatcatccctatctttggtacaacaaactacgcacagaggttccagggcagagtcactattaccgcggacgaatccacgagtacagcttacatggagctgagcagcctgagatcggaagacacggccgtgtattactgtgcgag

SEQ ID NO: 5361 - DNA, 261 bp, Homo sapiens
  modified_base (7)..(7): a, c, t, g, unknown or other
tcgaggnggagagtctctgaagatctcctgtcagggtttaggatacaattttgccggctactggttcggctgggtgcgccagaggcccggatacggcctggagtggatggggaccatctatcctggcgactcgtctactagatataatccgtcctttcaaggccaaatctccatctcagccgacgactccaccacgaccgcctacctgcagtggcccagcctgaaggcctcggacagcggcacctattattgtgcgggaca

SEQ ID NO: 5362 - DNA, 238 bp, Homo sapiens
aggtctcctgcaaggcatctggatacaccttcaccggctactttatccactgggtgcgacaggcccctggacaagggcttgaatggatggggtggatcaaccctaacagtggtggcgcaaactctgcacagaagtttcagggcagggtcaccatgaccagggacacgtccatcaccacagcctacatggacctgaccaggctgacatctgacgacacggccgtgtattactgtgcgag

SEQ ID NO: 5363 - DNA, 171 bp, Homo sapiens
  modified_base (9)..(9): a, c, t, g, unknown or other
  modified_base (24)..(24): a, c, t, g, unknown or other
  modified_base (30)..(31): a, c, t, g, unknown or other
  modified_base (38)..(38): a, c, t, g, unknown or other
  modified_base (40)..(40): a, c, t, g, unknown or other
  modified_base (43)..(43): a, c, t, g, unknown or other
  modified_base (63)..(63): a, c, t, g, unknown or other
  modified_base (81)..(81): a, c, t, g, unknown or other
  modified_base (102)..(102): a, c, t, g, unknown or other
  modified_base (105)..(106): a, c, t, g, unknown or other
  modified_base (108)..(110): a, c, t, g, unknown or other
  modified_base (120)..(120): a, c, t, g, unknown or other
aggccttgngtggctgggaagganatactnnttggccnantgntatactgattctgcagtatntgtgaaaggtcgaatagncgtcaacgcagacccatccgnganncnnntctccctgcnactgaactctgtgactcccgaggacacggctgtctactattgtgtaagaga

SEQ ID NO: 5364 - DNA, 257 bp, Homo sapiens
cttcggagaccctgtccctcacctgcagtgtctctggtgtcgccgtcaacactgatctttactactggagctgggtccggcaggccccagggaagggactggaatggattggttatgtctatagccacggaagaaccaactacaacccctccctcaagggccgagtcaccgtttcagcagacccgtccacgaataccttctccctgaacctgatgtctatgaccgctgcggacaaggccgtctactactgtgcgaga

SEQ ID NO: 5365 - DNA, 290 bp, Homo sapiens
ctgcaggagtcgggcccaggactggtgaagccttcggagaccctgtccctcacctgcactgtctctggtggctccatcagcggtagtggttacttctggggctggatccgccagcccccaggggaggggctggaatggattgggactatcaattatggtgggaccgcctactacaacccgtccctcaagagtcgagtcgccatatccgtagacacgtccaagagccaggtctccctgaggctgagctctgtgaccgccgcagacacggctgtgtattattgtgcgagaca

SEQ ID NO: 5366 - DNA, 260 bp, Homo sapiens
  modified_base (190)..(190): a, c, t, g, unknown or other
cagcctggggggtccctgagactctcctgtgcagcctctggattcagctttagtagctattggatgacttgggtccgccaggctccagggaaggggctggagtgggtggccaacataaaccaagatggaagtgagaaagactttgtggactctgtgaagggccgattcaccatctccagagacaacgccnagagctcactgtttctgcaaatgaacagcctgagagccgaggacacggctgtgtattattgtgcgagaga

SEQ ID NO: 5367 - DNA, 222 bp, Homo sapiens
  modified_base (25)..(25): a, c, t, g, unknown or other
  modified_base (94)..(94): a, c, t, g, unknown or other
  modified_base (109)..(109): a, c, t, g, unknown or other
  modified_base (134)..(134): a, c, t, g, unknown or other
  modified_base (136)..(136): a, c, t, g, unknown or other
tgtctctagcgacactgctgcttgnaactggatcaggcagtccccatcgagaggccttgagtggctgggaaggacatattacaggtccaagtgntataatgattatgcngtgtctgtgaaaagtcgaatagccntnaacccagaaacatccaagaaccagttctccctgcagctgaactctgtgactcccgaggacacggctgtctattattgtgcaagaga

SEQ ID NO: 5368 - DNA, 256 bp, Homo sapiens
tctggggggtccctgagactctcctgtgtaggctctggattcacctttagtaactatcccattaggtgggtccgccaggctccagggaaggggctggagtgggtctcatctattagtgctactggtgctaccatttactacgcagactccgtgaagggccggttcaccatctccagagacaattccaagaacacggtttatctgcaagtgaacagcctgagagccgaggacacggccgtatattactgtgcgagag

SEQ ID NO: 5369 - DNA, 294 bp, Homo sapiens
gaggtgcagctgttggagtctgggggaggcttggtacagccgggagggtccctgagactctcctgtgcagcctctggatccacctctaccagctttcccatgagctgggtccgccagtctccagggatggggccggagtgggtctcaagtattagtcgtgatggtattctcacatattacaaagactccgtgaagggccggttcaccctctccagagacaattccaagaacactctgtatctagaaatgaacagcctgacaactgacgacacggccgtttattactgtgcgaaa

SEQ ID NO: 5370 - DNA, 288 bp, Homo sapiens
aggtgcagctggtgcagtctggggctgaggtgaagaagcctgggtcctcggtgagggtgtcctgcaaggcttccggtggcaccttcgacacttacgctttcagctgggtgcgacaggcccctggacaaggccttgagtggatgggaggtatcgtccctatccttggaacgacagactacgcacagaggttccagggcagagtctccattaccgcggacaaagccacgactacagcctacatggacttgagcagcctgagatccgaggacacggccgtctactactgtg

SEQ ID NO: 5371 - DNA, 256 bp, Homo sapiens
cttcggagaccctgtccctcacctgcactgtctctggtggctccttcagcagtaatgcttactactgggactggatccgccagcccccagggaaggggccggagtggattgggagtttctattacagggggaccccctacaacaacccgtccctcaagagtcgagtcaccatatcccttgacacgtccaagaaccagttctccctgaagctgacctctgtgaccgccgcagacacggctgtgtattactgtgcgag

SEQ ID NO: 5372 - DNA, 237 bp, Homo sapiens
gtctcctgcaaggcttctggagtcaccttcagcagttatgctatcagctgggtgcgacaggcccctggacaagggcttgagtggatgggaggggtcctccctatgtttaatgtaccaaagtacgcacagaaatttcagggtagagtcacgattaccgcggacaaatccacgaacacagcctacttggagctgagcagactgagatctgaggacacggccgtgtactactgttcgaga

SEQ ID NO: 5373 - DNA, 121 bp, Homo sapiens
acatattacgcagactccgtgaagggccggttcaccatctccagagacaattctaagaacacggtgtatctccaaataatttctctgcgggtcgaggacacggccgtatattattgcacga

SEQ ID NO: 5374 - DNA, 246 bp, Homo sapiens
ctcggtgacggtctcctgcaaggcctctggaggcactttcagcagtcgcgcaactagttgggtgcgacaggcccctggacaagggcttgagtggatgggaggaatcatccctatccttgataaaacgaactacgcacagaagttccagggcagagtcacaattaccgcggacagatccacgagcacagcctacatggagctgagcagcctcagatctgaagacacgggcatgtattactgtgcgag

SEQ ID NO: 5375 - DNA, 296 bp, Homo sapiens
caggtgcagctggtggagtctgggggaggcgtggtccagcctgggaggtccctgagactctcctgtgcagcctctggattcaccttcagaagctttgccatgaactgggtccgccaggctccaggcaaggggctggagtgggtggcaggtatatcatatgatggaggtaatgaatactatgtagactccgtgaagggccgattcaccatctccagagacaatgccaagaacacgctgcatctgcaaatgaacagcctgagagctgaggacacggctgtgtattattgtgtgaaaga

SEQ ID NO: 5376 - DNA, 247 bp, Homo sapiens
cttagactctcctgtgcaccctctggattcactttcactcacgcctggatgacctgggtccgccaggctccagggaagggcctggagtgggttggccgtattaaaagtgaccgtgatggtgggacagcagactacgctgcacccgtgaaaggcagattcaccatctcaaaagatgattcaaagaagacggtctatctgcaaatggacagcctgaaaaccgaggacacagccatatattactgtacca

SEQ ID NO: 5377 - DNA, 218 bp, Homo sapiens
ctctggattctccttcagtgattattacatgagctgggtccgccaggctcccgggaaggggctggactgggtttcatccattagtacaagtggaagtattataaactatgctgactcagtgaagggccgatttatcatctccagggacaactccaagagttcactgtttttggacatgagcgacctgcgagtcgaagattcggccctttattattgtg

SEQ ID NO: 5378 - DNA, 260 bp, Homo sapiens
cagcctggggggtccctgagactctcctgtgaagcctctggattcatttttagtagctattggatgacctgggtccgccaggctccagggaagggcctggagtgggtggccaacataaaccaagatgggagtgagaaagactatgtggactctgtgaagggccgattcaccatctccagagacaacgccaagaactcactgtatctgcaaatgaacagcctgagagccgaggacacggctgtgtattattgtgcgagaga

SEQ ID NO: 5379 - DNA, 289 bp, Homo sapiens
gtgcagctggtggagtctgggggaggcttggtacagcctggcaggtccctgagactctcctgtgcagcctctggattcaactttgatgattatgccatgcactgggtctggcaaactccagggaagggcctggagtgggtctcaggtcttagtggagatagtggtaccataggctatgcggactctgtgaagggccgattcaccatctccagagacaacgccaaggactccctatatctgcaaatgaacagtctgagaactgaggacacggccttgtattactgtgtaa

SEQ ID NO: 5380 - DNA, 289 bp, Homo sapiens
aggtgcagctggtgcagtctggggctgagctaaagaagccgggggcctcagtgaagctctcctgcaaggcttctggatacactttcagcggctactatatgagctgggtgcgacaggcccctggacagggccttgagtggatgggatggatcctcccagccagtggcgacacaaagtactcacagagatttcaggggagggtcaccatgaccacggacacgtccatcagcacagcctacatggacctgaagagtctcacaggtgacgacacggccgtctattattgtgc

SEQ ID NO: 5381 - DNA, 199 bp, Homo sapiens
  modified_base (46)..(46): a, c, t, g, unknown or other
  modified_base (63)..(63): a, c, t, g, unknown or other
  modified_base (68)..(68): a, c, t, g, unknown or other
  modified_base (70)..(70): a, c, t, g, unknown or other
  modified_base (73)..(73): a, c, t, g, unknown or other
ttactactggggctgggtccgccagcccccggggaaggggctggantgggttgggagtgtgtnttatncnggnatcgcccactataacccgtccctcacgagtcgagtcaccatagatgtagacaggcccaagaatcagttttccctgaaactgacctctgtgaccgccgcagacacggctgtctattactgtgcgaga

SEQ ID NO: 5382 - DNA, 298 bp, Homo sapiens
gaggtgcagctggtggagtcggggggaggcctggtagagccggggggatctctaagactctcctgtacaggctctggattcccattcattaacgcctacttcagctgggtccgccaggctccagggaagggtctggagtgggttgctcgtattaaaaggcaaagtagtggtgggaccacagactacgctgcacccgtgaagggcagattcaccatctcaagagatgattcaaaaaacaccgtgtatctgcaaatgagcagcctgagaaccgaggacacagccgtgtattactgtgcca

SEQ ID NO: 5383 - DNA, 295 bp, Homo sapiens
tgcagctgcaggagtcgggcccaggactggtgaagccttcggagaccctgtccctcacctgcactgtctctggtgcctccatgaatagtgaagccttctactggggctggatccgccagtccccaggcaaggggctggagtccattgggagtatgtcctatagtgggaccccctactacaagccgtccctcaagagtcgcgtcagcatatctcttgacacgtccaagagttcgttctctctgaagctgacctctgtgaccgccgcagacacggctgtctatttctgtgcgagaca

SEQ ID NO: 5384 - DNA, 295 bp, Homo sapiens
tgcagctgcaggagtcgggcccaggactggtgaagccttcggagaccctgtccctcacctgcactgtctctggtggctccatcagcagtagtagttactactggggcgggatccgccagcccccagggaaggggctggagtggattgggagtatctattatagtgggagcacctacgacaacccgtccctcaagagtcgagtcaccatatccgtagacacgtccaagaaccagttctccctgaagctgagctctgtgaccgccgcagacacggctgtgtattactgtgcgagaca

SEQ ID NO: 5385 - DNA, 256 bp, Homo sapiens
  modified_base (2)..(5): a, c, t, g, unknown or other
cnnnnggggctcaagtgatgtctcctgcaggcttctggatacaccttcaccggctactatatgcactgggtgcgacaggcccctggacaagggcttgagtggatgggatggatcaaccctaacagtggtggcaccaactatgcacacaagtttcagggcagggtcaccatgaccagggacacgtccatcagcacagcctacatggagctgagcaggctgagatctgacgacacggccatgtattactgtgcgagag

SEQ ID NO: 5386 - DNA, 294 bp, Homo sapiens
tgcagctgcaggagtcgggcccaggactggtgaagccttcggagaccctgtccctcacctgcactgtctctggtggctccatcagcagtagtagttactactggggctggatccgccagcccccagggaaggggctggagtggattgggagtatctattatagtgggagcacctactacaacccgtccctcaagagtcgagtcaccatatccgtagacacgtccaagaagcagttctccctgaagctgagctctgtgaccgccgcagacacggctgtgtattactgtgcgagac

SEQ ID NO: 5387 - DNA, 245 bp, Homo sapiens
cctgagactctcctgtgctgcctctgggttcaggtttagcacctttgccatgagctgggtccgccagtctccagggaaggggctggaatgggtctcagctattagtgggcctggtcggggcacatactacacagactccgtggagggccgcttcaccatctccagagacaactccaagaacgtggtgtttcttcaaatgaacagcctgagagccgaggacacggccgtttatttctgtgcgaaag

SEQ ID NO: 5388 - DNA, 238 bp, Homo sapiens
cctcacctgcactgtctctggtggctccatcagcagtagtagttactactggggctggatccgccagcccccagggaaggggctggagtggattgggagtatctattatagtgggagcacctactacaacccgtccctcaagagtcgagtcaccatatccgtagacacgtccaagaaccagttctccctgaagctgagctctgtgaccgccgcagacacggctgtgtattactgtgcg

SEQ ID NO: 5389 - DNA, 242 bp, Homo sapiens
cctgagactctcctgtgcagcctctggattcaccttcagtagctatggcatgcactgggtccgccaggctccaggcaaggggctggagtgggtggcagttatatcatatgatggaagtaataaatactatgcagactccgtgaagggccgattcaccatctccagagacaattccaagaacacgctgtatctgcaaatgaacagcctgagagctgaggacacggctgtgtattactgtgcga

SEQ ID NO: 5390 - DNA, 252 bp, Homo sapiens
cttcggagaccctgtccctcacctgcactgtctctggtggctccatcagttattactactggacctggattcggcagccccccgggaagggactgcagtggattgggtttatctatgacagtgggagcaccaactacaacccctccctcaagagtcgagtcaccatgtcagtagacacgtccaagaaccagttctccctgaagctgagctcagtgaccgctgcggacacggccatgtattactgtgcgagag

SEQ ID NO: 5391 - DNA, 251 bp, Homo sapiens
cctgagactctcctgtacaacttctggattcacctttggtgattatgctatgagctgggtccgccaggctccagggaaggggctggagtgggtaggtttcattagagccaaaccttatggtgggacgacagaatacgccgcgtctctgaaaggcagattcaccatctcaagagatgattccaaaagcgtcgcctatctgcaaatgaacagcctgaaaaccgaagacacagccgtgtatttttgtgctagag

SEQ ID NO: 5392 - DNA, 252 bp, Homo sapiens
  modified_base (10)..(10): a, c, t, g, unknown or other
  modified_base (15)..(15): a, c, t, g, unknown or other
agaccttgtncctcncctgcactgtctctggtggctccatcagcagtggtggttactactggagctggatccgccagcacccagggaagggcctggagtggattgggtacatctattacagtgggagcacctactacaacccgtccctcaagagtcgagttaccatatcagtagacacgtctaagaaccagttctccctgaagctgagctctgtgactgccgcggacacggccgtgtattactgtgcgagag

SEQ ID NO: 5393 - DNA, 243 bp, Homo sapiens
cctgagactctcctgtgcagcctctggattcacctttgatgattatgccatgcactgggtccgtcaagttccagggaagggtctggagtgggtctctcttattagtggggatggtggtagcacatactatgcagactctgtgaagggccgattcaccatctccagagacaacagcaaaaactccctgtatctgcaaatgaacagtctgagaactgaggacaccgccttgtattactgtgcaaa

SEQ ID NO: 5394 - DNA, 255 bp, Homo sapiens
tggggcctcagtgaaggtctcctgcaaggcttctggatacaccttcatcggctactatatgcactgggtgcgacaggcccctggacaagggcttgagtggatgggatggatcaaccctaacactggtggcacaaactatgcacagaagtttcagggcagggtcaccatgaccagggacacgtccatcagcacagcctacatggagctgagcaggctgagatctgacgacacggccgtgtattactgtgcgagaga

SEQ ID NO: 5395 - DNA, 235 bp, Homo sapiens
gcactgtctctggtggctccatcagcagtagtagttactactggggctggatccgccagcccccagggaaggggctggagtggattgggagtatctattatagtgggaacacctactacaacccgtccctcaagagtcgagtcaccatatccgtagacacgtccaagaaccagttctccctgaagctgagctctgtgaccgccgcagacacggctgtgtattactgtgggagaca

SEQ ID NO: 5396 - DNA, 243 bp, Homo sapiens
cctcacctgcactgtctctggtggctccatcagcagtagtagttactactggggctggatccgccagcccccagggaaggggctggagtggattgggagtatgtattatagtgggaacacctactacaacccgtccctcaagagtcgagtcaccatatccgtagacacgtccaagaaccagttctccctgaagctgagctctgtgaccgccgcagacacggctgtgtattactgtgcgagaca

SEQ ID NO: 5397 - DNA, 246 bp, Homo sapiens
cctgagactctcctgtgcagcgtctggattcaccttcagtacctatggcatgcactgggtccgccaggctccaggcaaggggctggagtgggtggcagttatatggtatgatggaagtaataaatactatgcagactccgtgaagggccgattcaccatctccagagacaattccaagaacacgctgtatctgcaaatgaacagcctgagagccgaggacacggctgtgtattactgtgcgagaga

SEQ ID NO: 5398 - DNA, 245 bp, Homo sapiens
cctgagactctcctgtgcagcctccggattcaagttcagtgactatggcatgcactgggtccgccaggctccaggccaggggctgcaatgggtggcagtcacatcatttgttggaactatgaaatattatgccgactccctgaagggccgattcaccatctccagagacaattccaagaacacgctgtatttgcaaatgaacaacctgagagctgaggactcgggtgtgtacttctgtgcgaaag

SEQ ID NO: 5399 - DNA, 239 bp, Homo sapiens
aggtctcctgcaaggcttctggttacacctttaccagctatggtatcagctgggtgcgacaggcccctggacaagggcttgagtggatgggatggatcagcgcttacaatggtaacacaaactatgcacagaagctccagggcagagtcaccatgaccacagacacatccacgagcacagcctacatggagctgaggagcctgagatctgacgacacggccgtgtattactgtgcgaga

SEQ ID NO: 5400 - DNA, 250 bp, Homo sapiens
ggtccatgagactctcctgtgcagcctctggattcaccttcagtgactactacatgagctggatccgccaggctccagggaaggggctggagtgggtttcatacattagtagtagtggtagtaccatatactacgcagactctgtgaagggccgattcaccatctccagggacaacgccaagaactcactgtatctgcaaatgaacagcctgagagccgaggacacggccgtgtattactgtgcgagaga

SEQ ID NO: 5401 - DNA, 268 bp, Homo sapiens
  modified_base (2)..(2): a, c, t, g, unknown or other
  modified_base (4)..(4): a, c, t, g, unknown or other
  modified_base (6)..(6): a, c, t, g, unknown or other
  modified_base (15)..(15): a, c, t, g, unknown or other
anantntgagcttcnagaccctgtccctcacctgcactgtctctggtggctccatcagcagtggtggttactactggagctggatccgccagcacccagggaagggcctggagtggattgggtacatctattacagtgggagcacctactacaacccgtccctcaagagtcgagttaccatatcagtagacacgtctaagaaccagttctccctgaagctgagctctgtgactgccgcggacacggccgtgtattactgtgcgagaga

SEQ ID NO: 5402 - DNA, 257 bp, Homo sapiens
  modified_base (2)..(8): a, c, t, g, unknown or other
gnnnnnnngagtctctgaggatctcctgtaagggttctggatacagctttaccagctactggatcagctgggtgcgccagatgcccgggaaaggcctggagtggatggggaggattgatcctagtgactcttataccaactacagcccgtccttccaaggccacgtcaccatctcagctgacaagtccatcagcactgcctacctgcagtggagcagcctgaaggcctcggacaccgccatgtattactgtgcgaga

SEQ ID NO: 5403 - DNA, 242 bp, Homo sapiens; identical to SEQ ID NO: 5389

SEQ ID NO: 5404 - DNA, 241 bp, Homo sapiens
gagactctcctgtgcagcctctggattcacctttgatgattatgccatgcactgggtccgtcaagctccagggaagggtctggagtgggtctctcttattagtggggatggtggtagcacatactatgcagactctgtgaagggccgattcaccatctccagagacaacagcaaaaactccctgtatctgcaaatgaacagtctgagaactgaggacaccgccttgtattactgtgcaaaa

SEQ ID NO: 5405 - DNA, 246 bp, Homo sapiens
cctgagactctcctgtgcagcctctggattcacctttagtagctattggatgagctgggtccgccaggctccagggaaggggctggagtgggtggccaacataaagcaagatggaagtgagaaatactatgtggactctgtgaagggccgattcaccatctccagagacaacgccaagaactcactgtatctgcaaatgaacagcctgagagccgaggacacggccgtgtattactgtgcgagaga

SEQ ID NO: 5406 - DNA, 289 bp, Homo sapiens
gaggtgcagctggtggagtctggaggaggcttgatccagcctggggggtccctgagactctcctgtgcagcctctgggttcagtgtcaggagcaactacttgacctgggtccgccaggctccagggaaggggctggagtgggtctcagttatttatagcggtgatagcacagactacgcagactccgtgaagggccgattcaccttctccagagacaattccaagaacacggtgtatcttcaaatgaacagcctgagagccgaggacacggccgtttattactgtgcga

SEQ ID NO: 5407 - DNA, 295 bp, Homo sapiens
aggtgcagctggtgcagtctggggctgaggtgaagaagcctggggcctcagtgaaggtctcctgcaaggcttctggatacaccttcaccggctactatatgcactgggtgcgacaggcccctggacaagggcttgagtggatgggatggatcaaccctaacagtggtggcacaaactatgcacagaagtttcagggcagggtcaccatgaccagggacacggccatcagcacagcctacatggagctgagcaggctgagatctgacgacacggccgtgtattattgtgcgagaga

SEQ ID NO: 5408 - DNA, 242 bp, Homo sapiens
tgagactctcctgtgcagcctctggattcacctttgatgattatgccatgcactgggtccgtcaagctccagggaagggtctggagtgggtctctcttattagtggggatggtggtagcacatactatgcagactctgtgaagggccgattcaccatctccagagacaacagcaaaaactccctgtatctgcaaatgaacagtctgagaactgaggacaccgccttgtattactgtgcaaaa

SEQ ID NO: 5409 - DNA, 245 bp, Homo sapiens
  modified_base (51)..(51): a, c, t, g, unknown or other
  modified_base (55)..(55): a, c, t, g, unknown or other
gtccctcacctgcactgtctctggtggctccatcagcagtggtggttactnctgnagctggatccgccagcacccagggaagggcctggagtggattgggtacatctattacagtgggagcacctactacaacccgtccctcaagagtcgagttaccatatcagtagacacgtctaagaaccagttctccctgaagctgagctctgtgactgccgcggacacggccgtgtattactgtgcgagag

SEQ ID NO: 5410 - DNA, 248 bp, Homo sapiens
cttcggagaccctgtccctcacctgcactgtctctggtggctccatcagtaattactattggacctggatccggcagcccccagggaagggactggagtggattgggaatgagtattacagtgggagcaccaactacaacccctccttcaagagtcgagtcaccatatcagtagactcgtccaagaaccaattctccctgaaactgagctctgtgaccgccgccgacacggccgtgtattactgtgcg

SEQ ID NO: 5411 - DNA, 226 bp, Homo sapiens
aggcttctggatacaccttcaccggctactatatgcactgggtgcgacaggcccctggacaagggcttgagtggatgggatggatcaaccctaacagtggtggcacaaactatgcacagaagtttcagggcagggtcaccatgaccagggacacgtccatcagcacagcctacatggagctgagcaggctgagatctgacgacacggccgtgtattactgtgcgag

SEQ ID NO: 5412 - DNA, 242 bp, Homo sapiens
cctcacctgcactgtctctggtggctccatcagcagtagtagttactactggggctggatccgccagcccccagggaaggggctggagtggattgggaatatctattatagtgggaacacctactacaacccgtccctcaagagtcgagtcaccatatccgtagacacgtccaagaaccagttctccctgaagctgagctctgtgaccgccgcagacacggctgtatattactgtgcgagac

SEQ ID NO: 5413 - DNA, 242 bp, Homo sapiens
ctgagactctcctgtgcagcctctggattcaccttcagtagctacgacatgcactgggtccgccaagctacaggaaaaggtctggagtgggtctcagctattggtactgctggtgacacatactatccaggctccgtgaagggccgattcaccatctccagagaaaatgccaagaactccttgtatcttcaaatgaacagcctgagagccggggacacggctgtgtattactgtgcaagaga

SEQ ID NO: 5414 - DNA, 239 bp, Homo sapiens
tgagactctcctgtgcagcctctggattcacctttgatgattatgccatgcactgggtccggcaagctccagggaagggcctggagtgggtctcaggtattagttggaatagtggtagcataggctatgcggactctgtgaagggccgattcaccatcttcagaaacaacgccaagaactccctgtatctgcaaatgaacagtctgagagctgaggacacggccttgtattactgttca

SEQ ID NO: 5415 - DNA, 241 bp, Homo sapiens
gagactctcctgtgcagcctctggattcaccttcagtagctatggcatgcactgggtccgccaggctccaggcaaggggctggagtgggtggcagttatatcatatgatggaagtaataaatactatgcagactccgtgaagggccgattcaccatctccagagacaattccaagaacacgctgtatctgcaaatgaacagcctgagagttgaggacacggctgtgtattactgtgcgaga

SEQ ID NO: 5416 - DNA, 301 bp, Homo sapiens
gaggtgcagctggtggagtctgggggaggcttggtaaagcctggggggtcccttagactctcctgtgcagcctctggattcattttcaataacgcctggatgagctgggtccgccagcctccagggaaggggctgcagtgggttggccattttaaaatcaaagctgatggtgggacaacagactacgctgcacccgtgaaaggcagattcaccatctcaagagatgaatcaaaaaacatgctgtatctgcaaatgaacagcctgaaaaccgaggacacagccatttattactgtaccacag

SEQ ID NO: 5417 - DNA, 243 bp, Homo sapiens
cctcacctgcactgtctctggtggctccatcagcagtagtaattactactggggctggatccgccagcccccagggaaggggctggagtggattgggagtatctattatagtgggaacacctactacaacccgtccctcaagagtcgagtcaccatatccgtagacacgtccaagaaccagttctccctgaagctgagctctgtgaccgccgcagacacggctgtgtattactgtgcgagaca

SEQ ID NO: 5418 - DNA, 296 bp, Homo sapiens
gaggtgcagctggtggagtctgggggaggcttggtccagcctggggggtccctgagactctcctgtgcagcctctggattcaccttcagtagctatcctatgcactgggtccgccaggctccagggaagggactggaatatgtttcagctattagtagtaatgggggtagcacattttatgcaaactctgtgaagggcagattcaccatctccagagacaattccaagaacacgctgtatcttcaaatgggcagcctgagcgctgaagacatggctgtgtattactgtgcgagaga

SEQ ID NO: 5419 - DNA, 241 bp, Homo sapiens
ccctcacctgcactgtctctggtggctccatcagcagtagtagttactactggggctggatccgccagcccccagggaaggggctggagtggattgggagtatctattatagtgggagcacctactacaacccgtccctcaagagtcgagtcaccatatccgtagacacgtccaagaaccagttctccctgaagctgagctctgtgaccgccgcagacacggctgtgtattactgtgcgag

SEQ ID NO: 5420 - DNA, 243 bp, Homo sapiens
cctcacctgcactgtctctggtggctccatcagcagtagtagttactactggggctggatccgccagccccccgggaagggactggagtggattgggagtatctattatagtgggcgcacctactacaacccgtccctcaagagtcgagtcaccatatccgtagacacgtccaagaaccagttctccctgaggctgagctctgtgaccgccgcagacacggctgtgtattactgtgcgagaca

SEQ ID NO: 5421 - DNA, 296 bp, Homo sapiens
gaggtgcagctggtgcagtctggagtagaagtgaaaaagcccggggagtctctgaagatctcctgtaagggttctggatacagcttcaccagttactggatcggctgggtgcgccagatgcccgggaaaggcctggagtggatgggggtcatctatcctagtgactctgacaccagatacagcccgtccttccaaggccaggtcaccatctcagccgacacgtccatcagcaccgcctacctgcagtggagcagcctgaaggcctcggacaccgccatgtactactgtgcgagaca

SEQ ID NO: 5422 - DNA, 243 bp, Homo sapiens
  modified_base (43)..(43): a, c, t, g, unknown or other
  modified_base (80)..(80): a, c, t, g, unknown or other
cctcacctgcactgtctctggtggctccatcagcagtagtagntactactggggctggatccgccagcccccagggaagnggctggagtggattgggagtatctattatagtgggaacacctactacaacccgtccctcaagagtcgagtcaccatatccgtagacacgtccaagaaccagttctccctgaagctgagctctgtgaccgccgcagacacggctgtgtattactgtgcgagaca

SEQ ID NO: 5423 - DNA, 240 bp, Homo sapiens
cctcacctgcactgtctctgatggctccatcagcagtagtagttactactggggctggatccgccagcccccagggaaggggctggagtggattgggagtatctattatagtgggagcacctactacaacccgtccctcaagagtcgagtcaccatatccgtagacacgtccaagaaccagttctccctgaagctgagctctgtgaccgccgcagacacggctgtgtattactgtgcgag

SEQ ID NO: 5424 - DNA, 241 bp, Homo sapiens
cctcacctgcactgtctctggtggctccatcagcagtggtggttactactggagctggatccgccagcacccagggaagggcctggagtggattgggtacatccattacagtgggagcacctactacaacccgtccctcaagagtcgagttaccatatcagtagacacgtctaagaaccagttctccctgaagctgagctctgtgactgccgcggacacggccgtgtattactgtgcgaga

SEQ ID NO: 5425 - DNA, 246 bp, Homo sapiens
  modified_base (107)..(107): a, c, t, g, unknown or other
cctgagactctcctgtgcagcgtcaggattcaccttcagtagatatggcatgcactgggtccgccaggctccaggcaaggggctggagtgggtggcagttatatggnatgatggaagtaataaatactatgcagactccgtgaagggccgattcaccatctccagagacaattccaagaacacgctgtatctgcaaatgaacagcctgagagccgaggacacggctgtgtattactgtgcgagaga

SEQ ID NO: 5426 - DNA, 246 bp, Homo sapiens
  modified_base (54)..(54): a, c, t, g, unknown or other
cctgagactctcctgtgcagcctctggattcaccttcagtgactactacatganctggatccgccaggctccagggaaggggctggagtgggtttcatacattagtagtagtggtagtaccatatactacgcagactctgtgaagggccgattcaccatctccagggacaacgccaagaactcactgtatctgcaaatgaacagcctgagagccgaggacacggccgtgtattactgtgcgagaga

SEQ ID NO: 5427 - DNA, 260 bp, Homo sapiens
  modified_base (2)..(2): a, c, t, g, unknown or other
  modified_base (8)..(8): a, c, t, g, unknown or other
  modified_base (10)..(10): a, c, t, g, unknown or other
gnaggctncngaccctgtcctcacctgcactgtctctggtggctccatcgacactgctgattattactggagttggatccgccagcacccagggaagggcctggactttattgggtacatctattacactgggagcaccttttatgccccgtcactcaggagccgtctgaccgtatcaatagacacgtctaacaaccacttctccctgaacctgacctctgtgactgccgcggacacggccgtctattactgtgcgagag

SEQ ID NO: 5428 - DNA, 244 bp, Homo sapiens
cctgagactctcctgtgcagcctctggattcaccttcagtgactactacatgagctggatccgccaggctccagggaaggggctggagtgggtttcatacattagtagtagtagtagttacacaaactacgcagactctgtgaagggccgattcaccatctccagagacaacgccaagaactcactgtatctgcaaatgaacagcctgagagccgaggacacggctgtgtattactgtgcgaga

SEQ ID NO: 5429 - DNA, 243 bp, Homo sapiens
tgagactctcctgtgcagcctctggattcaccttcagtagctatagcatgaactgggtccgccaggctccagggaaggggctggagtgggtctcatccattagtagtagtagtagttacatatactacgcagactcagtgaagggccgattcaccatctccagagacaacgccaagaactcactgtatctgcaaatgaacagcctgagagccgaggacacggctgtgtattactgtgcgagag

SEQ ID NO: 5430 - DNA, 243 bp, Homo sapiens; identical to SEQ ID NO: 5429

SEQ ID NO: 5431 - DNA, 244 bp, Homo sapiens; identical to SEQ ID NO: 5428

SEQ ID NO: 5432 - DNA, 291 bp, Homo sapiens
gtgcagctggtggagtctgggggaggcgtggtacagcctggggggtccctgagactctcctgtgcagcctctggattcacctttgatgattatgccatgcactgggtccgtcaagctccagggaagggtctggagtgggtctctcttattagtggggatggtggtagcacatactatgcagactctgtgaagggccgattcaccatctccagagacaacagcaaaaactccctgtatctgcaaatgaacagtctgagaactgaggacaccgccttgtattactgtgcaaaa

SEQ ID NO: 5433 - DNA, 295 bp, Homo sapiens
aggtgcagctggtggagtctgggggaggcttggtcaagcctggagggtccctgagactctcctgtgcagtctctggattcaccttcagtgactactacatgagctggatccgccaggctccagggagggggctggagtgggtttcattcattagtagtattggtcgtaccgtatactacgcagactctgtgaagggccgattcaccatctccagggacgacgccaagaactccctgtatctggaaatgcacagcctgagagccgaggacacggccgtatatttctgtgcgagaga

SEQ ID NO: 5434 - DNA, 295 bp, Homo sapiens
tgcagctgcaggagtcgggcccaggactggtgaagccttcggagaccctgtccctcacctgcactgtctctggtggctccatcagcagtagtagttactactggggctggatccgccagcccccagggaaggggctggagtggattgggagtatctattatagtgggaacacctactacaacccgtccctcaagagtcgagtcaccatatccgtagacacgtccaagaaccagttctccctgaagctgagctctgtgaccgccgcagacacggctgtgtattactgtgcgagaca

SEQ ID NO: 5435 - DNA, 246 bp, Homo sapiens; identical to SEQ ID NO: 5397

SEQ ID NO: 5436 - DNA, 243 bp, Homo sapiens
tgagactctcctgtgcagcctctggattcaccttcagtagttatgaaatgaactgggtccgccaggctccagggaaggggctggagtgggtttcatacattagtggtagtggtggtaccatatactacgcagactctgtgaggggccgattcaccatctccagagacaacgccaagaactcactgtatctgcaaatgaacagcctgagagccgaggacacggctgtttattactgtgcgagag

SEQ ID NO: 5437 - DNA, 242 bp, Homo sapiens
tgagactctcctgtgcagcctctggattcaccttcagtagctatagcatgaactgggtccgccaggctccagggaaggggctggagtgggtctcatccattagtagtagtggtagttacatatactacgcagactcactgaagggccgattcaccatctccagagacaacgccaagaactcactgtatctgcaaatgaacagcctgagagccgaggacacgtctgtgtattactgtgcgaga

SEQ ID NO: 5438 - DNA, 228 bp, Homo sapiens
aggcatctggatacaccttcaccagctactatatgcactgggtgcgacaggcccctggacaagggcttgagtggatgggaataatcaaccctagtggtggtagcacaagctacgcacagaagttccagggcagagtcaccatgaccagggacacgtccacgagcacagtctacatggagctgagcagcctgagatctgaggacacggccgtgtattactgtgcgagag

SEQ ID NO: 5439 - DNA, 125 bp, Homo sapiens
ccatatactacgcagactctgtgaagggccgattcaccatctccagagacaatgccaagaactcactgtatctgcaaatgaacagcctgagagacgaggacacggctgtgtattactgtgcgaga

SEQ ID NO: 5440 - DNA, 260 bp, Homo sapiens
cgttcggagaccctgtccctcacctgcactgtctctggtggctccatcagcagtagtagttactactggggctggatccgccagcccccagggaaggggctggagtggattgggagtatctattatagtgggaacacctactacaacccgtccctcaagagtcgagtcaccatatccgtagacacgtccaagaaccagttctccctgaagctgagctctgtgaccgccgcagacacggctgtgtattactgtgcgagaca

SEQ ID NO: 5441 - DNA, 298 bp, Homo sapiens
caggtgcagctgcaggagtcgggcccaggactggtgaagccttcacagaccctgtccctcacctgcactgtctctggtggctccatcagcagtggtgattactactggagttggatccgccagcccccagggaagggcctggagtggtttgggttcatctattacagtgggagcacctactacaacccgtccctcaagagtcgagttaccatatcagtagacacgtccaagaaccagttctccctgaagctgagctctgtgactgccgcagacacggccgtgtattactgtgccagag

SEQ ID NO: 5442 - DNA, 236 bp, Homo sapiens
cctcacctgcactgtctctggtgactccatcagtaattattactggacctggatccggcagcccccagggaagggactggagtggattgggtatttctatgacagtgggagccttaactacaacccctccctcaagagtcgagtcaccatatcagtagacacgtccaagagtaacttctccctgaagctgagatctgtgaccgctgcggacacggccgtgtattactgtgcgagag

SEQ ID NO: 5443 - DNA, 244 bp, Homo sapiens; identical to SEQ ID NO: 5428

SEQ ID NO: 5444 - DNA, 256 bp, Homo sapiens
  modified_base (3)..(8): a, c, t, g, unknown or other
  modified_base (65)..(66): a, c, t, g, unknown or other
  modified_base (143)..(144): a, c, t, g, unknown or other
  modified_base (155)..(156): a, c, t, g, unknown or other
  modified_base (163)..(163): a, c, t, g, unknown or other
  modified_base (175)..(176): a, c, t, g, unknown or other
  modified_base (194)..(194): a, c, t, g, unknown or other
  modified_base (207)..(208): a, c, t, g, unknown or other
  modified_base (213)..(213): a, c, t, g, unknown or other
  modified_base (219)..(219): a, c, t, g, unknown or other
  modified_base (239)..(239): a, c, t, g, unknown or other
ccnnnnnnagtctctgaggatctcctgtaagacttctggatacaggtttaccacctactggatcnnctgggtgcgccagatgcccgggaaaggcctggagtggatggggaggattgatcctactgactcttataccaactacnncccgtccttcnnaggccangtcaccttctcnnctgacaagtccatcagcnctgcctacctgcnntggcncacccngagggcctcggacaccgccntgtattactgtgcgaga

SEQ ID NO: 5445 - DNA, 245 bp, Homo sapiens
agaccctgtccctcacctgcactgtctccggtggctccatcagcagttacttctggagctggattcggcagtccccagagacgggactggagtggattgggtatatcttgtatactgggagcaccaactacaacccctccctcaagggtcgggtcaccatttcagtagacacgtccaagaaccagttcttcctggagctgaactctgtgaccgccgcagacacggccgtttattactgtgcgaga

SEQ ID NO: 5446 - DNA, 237 bp, Homo sapiens
aggtctcctgcaaggcttctggatacaccttcaccggctactatatgcactgggtgcgacaggcccctggacaagggcttgagtggatgggatggatcaaccctaacagtggtggcacaaactatgcacagaagtttcagggcagggtcaccatgaccagggacacgtccatcagcacagcctacatggagctgagcaggctgagatctgacgacacggccgtgtattactgtgcga

SEQ ID NO: 5447 - DNA, 244 bp, Homo sapiens; identical to SEQ ID NO: 5428

SEQ ID NO: 5448 - DNA, 260 bp, Homo sapiens
ccttcggagaccctgtccctcacctgcactgtctctggtggctccatcagcagtagtagttactactggggctggatccgccagcccccagggaaggggctggagtggattgggaatatctattatagtgggagcacctactacaacccgtccctcaagagtcgagtcaccatatccgtagacacgtccaagaaccagttctccctgaagctgagctctgtgaccgccgcagacacggctgtgtattactgtgcgagaca

SEQ ID NO: 5449 - DNA, 243 bp, Homo sapiens; identical to SEQ ID NO: 5429

SEQ ID NO: 5450 - DNA, 254 bp, Homo sapiens
tttcggagaccctgtccctcacctgcactgtctctggtggctccatcagcagtagtagttactactggggctggatccgccagcccccagggaaggggctggagtggattgggagtatctattatagtgggagcacctactacaacccgtccctcaagagtcgagtcaccatatccgtagacacgtccaagaaccagttctccctgaagctgagctctgtgaccgccgcagacacggctgtgtattactgtgcg

SEQ ID NO: 5451 - DNA, 248 bp, Homo sapiens
  modified_base (43)..(45): a, c, t, g, unknown or other
  modified_base (60)..(60): a, c, t, g, unknown or other
cctgtccctcacctgcactgtctctggtggctccatcagctgnnntggttactactgganctggatccgccagcacccagggaagggcctggagtggattgggtacatctattacagtgggagcacctactacaacccgtccctcaagagtcgagttaccatatcagtagacacgtctaagaaccagttctccctgaagctgagctctgtgactgccgcggacacggccgtgtattactgtgcgagag

SEQ ID NO: 5452 - DNA, 239 bp, Homo sapiens
  modified_base (23)..(23): a, c, t, g, unknown or other
  modified_base (119)..(119): a, c, t, g, unknown or other
cacctgcactgtctctggtggcnccatcagcagtagtagttactactggggctggatccgccagcccccagggaaggggctggagtggattgggagtatctattatagtgggagcaccnactacaacccgtccctcaagagtcgagtcaccatatccgtagacacgtccaagaaccagttctccctgaagctgagctctgtgaccgccgcagacacggctgtgtattactgtgcgagac

SEQ ID NO: 5453 - DNA, 257 bp, Homo sapiens
ttcggagaccctgtccctcacctgcactgtctctggtggctccatcagcagtagtagttactactggggctggatccgccagcccccagggaaggggctggagtggattgggagtatctattatagtgggaacacctactacaacccgtccctcaagagtcgagtcaccatatccgtagacacgtccaagaaccagttctccctgaagctgagctctgtgaccgccgcagacacggctgtgtattactgtgcgagac

SEQ ID NO: 5454 - DNA, 246 bp, Homo sapiens
cctgagactctcctgtgcagcctctggattcaccttcagtagctatggcatgcactgggtccgccaggctccaggcaaggggctggagtgggtggcagttatatcatatgatggaagtaataaatactatgcagactccgtgaagggccgattcaccatctccagagacaattccaagaacacggtgtatctgcaaatgaacagcctgagagctgaggacacggctgtgtattactgtgcgaaaga

SEQ ID NO: 5455 - DNA, 245 bp, Homo sapiens
cctgagactctcctgtgcagcgtctggattcaccttcagtggctatgacatgcactgggtccgccaggctccaggcaaggggctggagtgggtggcacttatttgctttgatggaaagaataaatattatgcagacttcgtggagggccgattcatcatctccagagacaattctcagaatacgctgtttctgcaaatgcacagcctgagagccgaggacacggctgtatattactgtgggagag

SEQ ID NO: 5456 - DNA, 243 bp, Homo sapiens
cctgagactctcctgtgcagcctctggattcaccttcagtagctatagcatgaactgggtccgccaggctccagggaaggggctggagtgggtctcatccattagtagtagtagtagttacatatactacgcagactcagtgaagggccgattcaccatctccagagacaacgccaagaactcactgtatctgcaaatgaacagcctgagagccgaggacacggctgtgtattactgtgcgag

SEQ ID NO: 5457 - DNA, 244 bp, Homo sapiens; identical to SEQ ID NO: 5428

SEQ ID NO: 5458 - DNA, 253 bp, Homo sapiens
tggggcctcagtgaatgtctcctgcaaggcttctggatacaccttcaccggctactatatgcactgggtgcgacaggcccctggacaagggcttgagtggatgggatggatcaaccctaacagtggtggcacaaactatgcacagaagtttcagggcagggtcaccatgaccagggacacgtccatcaccacagcctacatggacctgagcaggctgagatctgacgacacggccgtgtattactgtgcgaga

SEQ ID NO: 5459 - DNA, 74 bp, Homo sapiens
aggtgcagctggtgcagtctggggctgaggtgaagaagcctgggtcctcggtgaaggtctcctgcaagacttct

SEQ ID NO: 5460 - DNA, 19 bp, Homo sapiens
cctcacctgcgctgtctct

SEQ ID NO: 5461 - DNA, 43 bp, Homo sapiens
  modified_base (2)..(5): a, c, t, g, unknown or other
  modified_base (7)..(8): a, c, t, g, unknown or other
gnnnnannctgggaggtccctgagactctcctgtgaagcctct

SEQ ID NO: 5462 - DNA, 25 bp, Homo sapiens
cctgagactctcctgtgcagcgtct

SEQ ID NO: 5463 - DNA, 17 bp, Homo sapiens
tctcctgtgcagccact

SEQ ID NO: 5464 - DNA, 23 bp, Homo sapiens
tgagactgtcctgtgtagcctct

SEQ ID NO: 5465 - DNA, 25 bp, Homo sapiens
cctgagactgtcctgcgcagcctct

SEQ ID NO: 5466 - DNA, 19 bp, Homo sapiens
cctcacctgcactgtctct

SEQ ID NO: 5467 - DNA, 75 bp, Homo sapiens; identical to SEQ ID NO: 1379

SEQ ID NO: 5468 - DNA, 75 bp, Homo sapiens
caggtgcagctggtggagtctgggggaggcgtggtccggcctggggggtccctgagactctcctgtgaagcgtct

SEQ ID NO: 5469 - DNA, 74 bp, Homo sapiens
aggtgcagctggtgcagtctggggctgaggtgaagaagcctggggcctcagtgaaggtctcctgcaaggcctct

SEQ ID NO: 5470 - DNA, 20 bp, Homo sapiens
agatctcctgtaaggtttct

SEQ ID NO: 5471 - DNA, 28 bp, Homo sapiens
gaccctgtccctcacctgtgctgtctct

SEQ ID NO: 5472 - DNA, 75 bp, Homo sapiens
gaggtgcagctggtggagtctgggggaggcttggtccagccgggggggtccctaagactcgcctgtacagcctct

SEQ ID NO: 5473 - DNA, 75 bp, Homo sapiens
gaggtgcagctggtggagtctggggggggcgtggtccagcctggggggtccctgagactctcctgtgcagcctct

SEQ ID NO: 5474 - DNA, 75 bp, Homo sapiens
gaggtgcagctggtggagtctgggggaggcttggtccagccgggggggtccctgagactcgcctgtacagcctct

SEQ ID NO: 5475 - DNA, 35 bp, Homo sapiens
  modified_base (9)..(9): a, c, t, g, unknown or other
ctggggggnccctgagactctcctgttcagcctct

SEQ ID NO: 5476 - DNA, 25 bp, Homo sapiens
cctgagactctcctgtgcggcctct

SEQ ID NO: 5477 - DNA, 22 bp, Homo sapiens
gagactctcctgtgcaacctcc

SEQ ID NO: 5478 - DNA, 21 bp, Homo sapiens
aaggtttcttgcacggcatct

SEQ ID NO: 5479 - DNA, 20 bp, Homo sapiens
aggtttcctgcaaggcttct

SEQ ID NO: 5480 - DNA, 25 bp, Homo sapiens
cctgacactctcctgtgtaggctct

SEQ ID NO: 5481 - DNA, 25 bp, Homo sapiens
cctgagactctcctgtgaagcctct

SEQ ID NO: 5482 - DNA, 23 bp, Homo sapiens
tgagactctcctgtgcagcctct

SEQ ID NO: 5483 - DNA, 75 bp, Homo sapiens
caggtgcagctgcaggagtcgggcccaggcctggtgaagccttcggagaccctgtccctcatctgttctgtctct

SEQ ID NO: 5484 - DNA, 28 bp, Homo sapiens
ctcggtgagggtctcctgcaaggactct

SEQ ID NO: 5485 - DNA, 75 bp, Homo sapiens
gaggtgcagctggtggagtctgggggaggcttggtccggcctggggggtccctgagactctcctgtgcaccctct

SEQ ID NO: 5486 - DNA, 28 bp, Homo sapiens
ctcggtgagggtctcctgcaagacttct

SEQ ID NO: 5487 - DNA, 25 bp, Homo sapiens
cctgagactctcctgtgcagcgtct

SEQ ID NO: 5488 - DNA, 19 bp, Homo sapiens
cctcacctgcactgtgtct

SEQ ID NO: 5489 - DNA, 25 bp, Homo sapiens
cctgagactctcctgttcagcctca

SEQ ID NO: 5490 - DNA, 25 bp, Homo sapiens
cctgagactctcatgtgcagcctct

SEQ ID NO: 5491 - DNA, 21 bp, Homo sapiens
agactctcctgtgcagcctct

SEQ ID NO: 5492 - DNA, 25 bp, Homo sapiens
cctgagactctcctgtgcagcctct

SEQ ID NO: 5493 - DNA, 22 bp, Homo sapiens
  modified_base (11)..(11): a, c, t, g, unknown or other
gagactctccngtgcagcctct

SEQ ID NO: 5494 - DNA, 25 bp, Homo sapiens
cctgagactctcctgtgcagcctct

SEQ ID NO: 5495 - DNA, 23 bp, Homo sapiens
  modified_base (16)..(16): a, c, t, g, unknown or other
tgagactctcctgtgnagcctct

SEQ ID NO: 5496 - DNA, 35 bp, Homo sapiens
gctggggggtcctgagactctcctgtgcagcctct

SEQ ID NO: 5497 - DNA, 25 bp, Homo sapiens
cctgagactctcctgtgcagcctct

SEQ ID NO: 5498 - DNA, 25 bp, Homo sapiens
cctgagactctcctgtgcagcctct

SEQ ID NO: 5499 - DNA, 20 bp, Homo sapiens
  modified_base (12)..(12): a, c, t, g, unknown or other
  modified_base (14)..(14): a, c, t, g, unknown or other
ccctcacctgcncngtctct

SEQ ID NO: 5500 - DNA, 25 bp, Homo sapiens
cctgagactctcctgttcagcctct

SEQ ID NO: 5501 - DNA, 25 bp, Homo sapiens
cctgagactctcctgtgttgcctct

SEQ ID NO: 5502 - DNA, 19 bp, Homo sapiens
cctcacctgcactgtctct

SEQ ID NO: 5503 - DNA, 23 bp, Homo sapiens
tgagactctcctgtgcagcgtct

SEQ ID NO: 5504 - DNA, 25 bp, Homo sapiens
cctgagactctcctgtgcagcctct

SEQ ID NO: 5505 - DNA, 45 bp, Homo sapiens
  modified_base (2)..(3): a, c, t, g, unknown or other
  modified_base (6)..(6): a, c, t, g, unknown or other
tnnctngagctcagtgaggtttcctgcaagacatctggatacacc

SEQ ID NO: 5506 - DNA, 40 bp, Homo sapiens
  modified_base (4)..(4): a, c, t, g, unknown or other
  modified_base (11)..(12): a, c, t, g, unknown or other
cgcngagcttnngaccctgtccctcacgtgcaatgtctct

SEQ ID NO: 5507 - DNA, 35 bp, Homo sapiens
  modified_base (2)..(2): a, c, t, g, unknown or other
gngcggggggtctgagactctcctgtgtagcctct

SEQ ID NO: 5508 - DNA, 25 bp, Homo sapiens
cctgagactctcctgtgcagcgtct

SEQ ID NO: 5509 - DNA, 21 bp, Homo sapiens
agactctcctgtgcagcctct

SEQ ID NO: 5510 - DNA, 23 bp, Homo sapiens
tgagactctcctgtgcagcctct

SEQ ID NO: 5511 - DNA, 25 bp, Homo sapiens
cctgagactctcctgtgcagcctct

SEQ ID NO: 5512 - DNA, 25 bp, Homo sapiens
cctgagactctcctgtacagcctct

SEQ ID NO: 5513 - DNA, 19 bp, Homo sapiens
cctcacctgcactgtctcc

SEQ ID NO: 5514 - DNA, 20 bp, Homo sapiens
aggtctcctgcaaggcttct

SEQ ID NO: 5515 - DNA, 20 bp, Homo sapiens
aggtctcctgcgaggcttct

SEQ ID NO: 5516 - DNA, 19 bp, Homo sapiens
cctcacctgcactgtctct

SEQ ID NO: 5517 - DNA, 35 bp, Homo sapiens
cttcggggaccctgtccctcacctgcgctgtgtct

SEQ ID NO: 5518 - DNA, 19 bp, Homo sapiens
cctcacgtgcattgtctct

SEQ ID NO: 5519 - DNA, 22 bp, Homo sapiens
gagactctcctacgaagtctct

SEQ ID NO: 5520 - DNA, 25 bp, Homo sapiens
cctgagactctcctgtgcagcctct

SEQ ID NO: 5521 - DNA, 19 bp, Homo sapiens
cctcacctgcgctgtctct

SEQ ID NO: 5522 - DNA, 25 bp, Homo sapiens
ccttagactctcctgtgttggctct

SEQ ID NO: 5523 - DNA, 20 bp, Homo sapiens
aggtctcctgcaagggttct

SEQ ID NO: 5524 - DNA, 28 bp, Homo sapiens
ctcggtgagggtctcctgcaagggttct

SEQ ID NO: 5525 - DNA, 22 bp, Homo sapiens
gagactctcctgtgcagcctct

SEQ ID NO: 5526 - DNA, 39 bp, Homo sapiens
  modified_base (2)..(4): a, c, t, g, unknown or other
tnnnctggagggtccctgagactctcctgcgcagcctct

SEQ ID NO: 5527 - DNA, 12 bp, Homo sapiens
  modified_base (8)..(8): a, c, t, g, unknown or other
tgtgcagnctct

SEQ ID NO: 5528 - DNA, 27 bp, Homo sapiens
tcggtgagggtctcctgcaaggcttct

SEQ ID NO: 5529 - DNA, 25 bp, Homo sapiens
cctgagactctcctgtgcagtctct

SEQ ID NO: 5530 - DNA, 21 bp, Homo sapiens
  modified_base (3)..(3): a, c, t, g, unknown or other
gangtttcctgcaaggcatct

SEQ ID NO: 5531 - DNA, 25 bp, Homo sapiens
cctgagactctcctgtgcagcctct

SEQ ID NO: 5532 - DNA, 25 bp, Homo sapiens
cctgagactctcctgtacagcctct

SEQ ID NO: 5533 - DNA, 19 bp, Homo sapiens
cctcacctgcactgtcttt

SEQ ID NO: 5534 - DNA, 20 bp, Homo sapiens
aggtctcctgcagggcttct

SEQ ID NO: 5535 - DNA, 24 bp, Homo sapiens
gtgagggtctcctgcaaggcttct

SEQ ID NO: 5536 - DNA, 27 bp, Homo sapiens
  modified_base (4)..(4): a, c, t, g, unknown or other
  modified_base (6)..(6): a, c, t, g, unknown or other
  modified_base (8)..(8): a, c, t, g, unknown or other
  modified_base (10)..(10): a, c, t, g, unknown or other
atcngngncntctcctgcaagggttct

SEQ ID NO: 5537 - DNA, 23 bp, Homo sapiens
tgagactctcctgtgcagtctct

SEQ ID NO: 5538 - DNA, 20 bp, Homo sapiens
aggtctcgtgcaaggcttct

SEQ ID NO: 5539 - DNA, 28 bp, Homo sapiens
ctcggtgagggtctcctgcaagggttct

SEQ ID NO: 5540 - DNA, 24 bp, Homo sapiens
ctgagactctcctgcgcagcctct

SEQ ID NO: 5541 - DNA, 25 bp, Homo sapiens
cctgagactctcctgtgcagcctct

SEQ ID NO: 5542 - DNA, 25 bp, Homo sapiens
cctgagactctcctgtgcagcctct

SEQ ID NO: 5543 - DNA, 75 bp, Homo sapiens
gaggtgcagctggtggagtctgggggaggcttggtaaagccgggggggtcccttagagtctcctgtgcagcctct

SEQ ID NO: 5544 - DNA, 25 bp, Homo sapiens
cctgagactctcctgtgcagcctct

SEQ ID NO: 5545 - DNA, 37 bp, Homo sapiens
  modified_base (9)..(9): a, c, t, g, unknown or other
aagcatgantctcggtgatgtctcctgcaaggcttca

SEQ ID NO: 5546 - DNA, 40 bp, Homo sapiens
  modified_base (7)..(7): a, c, t, g, unknown or other
tcgaggnggagagtctctgaagatctcctgtcagggttta

SEQ ID NO: 5547 - DNA, 20 bp, Homo sapiens
aggtctcctgcaaggcatct

SEQ ID NO: 5548 - DNA, 35 bp, Homo sapiens
cttcggagaccctgtccctcacctgcagtgtctct

SEQ ID NO: 5549 - DNA, 66 bp, Homo sapiens
ctgcaggagtcgggcccaggactggtgaagccttcggagaccctgtccctcacctgcactgtctct

SEQ ID NO: 5550 - DNA, 39 bp, Homo sapiens
cagcctggggggtccctgagactctcctgtgcagcctct

SEQ ID NO: 5551 - DNA, 36 bp, Homo sapiens
tctggggggtccctgagactctcctgtgtaggctct

SEQ ID NO: 5552 - DNA, 75 bp, Homo sapiens
gaggtgcagctgttggagtctgggggaggcttggtacagccgggagggtccctgagactctcctgtgcagcctct

SEQ ID NO: 5553 - DNA, 74 bp, Homo sapiens
aggtgcagctggtgcagtctggggctgaggtgaagaagcctgggtcctcggtgagggtgtcctgcaaggcttcc

SEQ ID NO: 5554 - DNA, 35 bp, Homo sapiens
cttcggagaccctgtccctcacctgcactgtctct

SEQ ID NO: 5555 - DNA, 18 bp, Homo sapiens
gtctcctgcaaggcttct

SEQ ID NO: 5556 - DNA, 28 bp, Homo sapiens
ctcggtgacggtctcctgcaaggcctct

SEQ ID NO: 5557 - DNA, 75 bp, Homo sapiens; identical to SEQ ID NO: 1375

SEQ ID NO: 5558 - DNA, 24 bp, Homo sapiens
cttagactctcctgtgcaccctct

SEQ ID NO: 5559 - DNA, 39 bp, Homo sapiens
cagcctggggggtccctgagactctcctgtgaagcctct

SEQ ID NO: 5560 - DNA, 72 bp, Homo sapiens
gtgcagctggtggagtctgggggaggcttggtacagcctggcaggtccctgagactctcctgtgcagcctct

SEQ ID NO: 5561 - DNA, 74 bp, Homo sapiens
aggtgcagctggtgcagtctggggctgagctaaagaagccgggggcctcagtgaagctctcctgcaaggcttct

SEQ ID NO: 5562 - DNA, 75 bp, Homo sapiens
gaggtgcagctggtggagtcggggggaggcctggtagagccggggggatctctaagactctcctgtacaggctct

SEQ ID NO: 5563 - DNA, 71 bp, Homo sapiens
tgcagctgcaggagtcgggcccaggactggtgaagccttcggagaccctgtccctcacctgcactgtctct

SEQ ID NO: 5564 - DNA, 71 bp, Homo sapiens; identical to SEQ ID NO: 5563

SEQ ID NO: 5565 - DNA, 36 bp, Homo sapiens
  modified_base (2)..(5): a, c, t, g, unknown or other
cnnnnggggctcaagtgatgtctcctgcaggcttct

SEQ ID NO: 5566 - DNA, 71 bp, Homo sapiens; identical to SEQ ID NO: 5563

SEQ ID NO: 5567 - DNA, 25 bp, Homo sapiens
cctgagactctcctgtgctgcctct

SEQ ID NO: 5568 - DNA, 19 bp, Homo sapiens
cctcacctgcactgtctct

SEQ ID NO: 5569 - DNA, 25 bp, Homo sapiens
cctgagactctcctgtgcagcctct

SEQ ID NO: 5570 - DNA, 35 bp, Homo sapiens; identical to SEQ ID NO: 5554

SEQ ID NO: 5571 - DNA, 25 bp, Homo sapiens
cctgagactctcctgtacaacttct

SEQ ID NO: 5572 - DNA, 29 bp, Homo sapiens
  modified_base (10)..(10): a, c, t, g, unknown or other
  modified_base (15)..(15): a, c, t, g, unknown or other
agaccttgtncctcncctgcactgtctct

SEQ ID NO: 5573 - DNA, 25 bp, Homo sapiens
cctgagactctcctgtgcagcctct

SEQ ID NO: 5574 - DNA, 34 bp, Homo sapiens
tggggcctcagtgaaggtctcctgcaaggcttct

SEQ ID NO: 5575 - DNA, 11 bp, Homo sapiens
gcactgtctct

SEQ ID NO: 5576 - DNA, 19 bp, Homo sapiens
cctcacctgcactgtctct

SEQ ID NO: 5577 - DNA, 25 bp, Homo sapiens
cctgagactctcctgtgcagcgtct

SEQ ID NO: 5578 - DNA, 25 bp, Homo sapiens
cctgagactctcctgtgcagcctcc

SEQ ID NO: 5579 - DNA, 20 bp, Homo sapiens
aggtctcctgcaaggcttct

SEQ ID NO: 5580 - DNA, 29 bp, Homo sapiens
ggtccatgagactctcctgtgcagcctct

SEQ ID NO: 5581 - DNA, 44 bp, Homo sapiens
  modified_base (2)..(2): a, c, t, g, unknown or other
  modified_base (4)..(4): a, c, t, g, unknown or other
  modified_base (6)..(6): a, c, t, g, unknown or other
  modified_base (15)..(15): a, c, t, g, unknown or other
anantntgagcttcnagaccctgtccctcacctgcactgtctct

SEQ ID NO: 5582 - DNA, 38 bp, Homo sapiens
  modified_base (2)..(8): a, c, t, g, unknown or other
gnnnnnnngagtctctgaggatctcctgtaagggttct

SEQ ID NO: 5583 - DNA, 25 bp, Homo sapiens
cctgagactctcctgtgcagcctct

SEQ ID NO: 5584 - DNA, 22 bp, Homo sapiens
gagactctcctgtgcagcctct

SEQ ID NO: 5585 - DNA, 25 bp, Homo sapiens
cctgagactctcctgtgcagcctct

SEQ ID NO: 5586 - DNA, 75 bp, Homo sapiens
gaggtgcagctggtggagtctggaggaggcttgatccagcctggggggtccctgagactctcctgtgcagcctct

SEQ ID NO: 5587 - DNA, 74 bp, Homo sapiens
aggtgcagctggtgcagtctggggctgaggtgaagaagcctggggcctcagtgaaggtctcctgcaaggcttct

SEQ ID NO: 5588 - DNA, 23 bp, Homo sapiens
tgagactctcctgtgcagcctct

SEQ ID NO: 5589 - DNA, 22 bp, Homo sapiens
gtccctcacctgcactgtctct

SEQ ID NO: 5590 - DNA, 35 bp, Homo sapiens; identical to SEQ ID NO: 5554

SEQ ID NO: 5591 - DNA, 19 bp, Homo sapiens
cctcacctgcactgtctct

SEQ ID NO: 5592 - DNA, 24 bp, Homo sapiens
ctgagactctcctgtgcagcctct

SEQ ID NO: 5593 - DNA, 23 bp, Homo sapiens
tgagactctcctgtgcagcctct

SEQ ID NO: 5594 - DNA, 22 bp, Homo sapiens
gagactctcctgtgcagcctct

SEQ ID NO: 5595 - DNA, 75 bp, Homo sapiens
gaggtgcagctggtggagtctgggggaggcttggtaaagcctggggggtcccttagactctcctgtgcagcctct

SEQ ID NO: 5596 - DNA, 19 bp, Homo sapiens
cctcacctgcactgtctct

SEQ ID NO: 5597 - DNA, 75 bp, Homo sapiens
gaggtgcagctggtggagtctgggggaggcttggtccagcctggggggtccctgagactctcctgtgcagcctct

SEQ ID NO: 5598 - DNA, 20 bp, Homo sapiens
ccctcacctgcactgtctct

SEQ ID NO: 5599 - DNA, 19 bp, Homo sapiens
cctcacctgcactgtctct

SEQ ID NO: 5600 - DNA, 75 bp, Homo sapiens
gaggtgcagctggtgcagtctggagtagaagtgaaaaagcccggggagtctctgaagatctcctgtaagggttct

SEQ ID NO: 5601 - DNA, 19 bp, Homo sapiens
cctcacctgcactgtctct

SEQ ID NO: 5602 - DNA, 19 bp, Homo sapiens
cctcacctgcactgtctct

SEQ ID NO: 5603 - DNA, 19 bp, Homo sapiens
cctcacctgcactgtctct

SEQ ID NO: 5604 - DNA, 25 bp, Homo sapiens
cctgagactctcctgtgcagcgtca

SEQ ID NO: 5605 - DNA, 25 bp, Homo sapiens
cctgagactctcctgtgcagcctct

SEQ ID NO: 5606 - DNA, 37 bp, Homo sapiens
  modified_base (2)..(2): a, c, t, g, unknown or other
  modified_base (8)..(8): a, c, t, g, unknown or other
  modified_base (10)..(10): a, c, t, g, unknown or other
gnaggctncngaccctgtcctcacctgcactgtctct

SEQ ID NO: 5607 - DNA, 25 bp, Homo sapiens
cctgagactctcctgtgcagcctct

SEQ ID NO: 5608 - DNA, 23 bp, Homo sapiens
tgagactctcctgtgcagcctct

SEQ ID NO: 5609 - DNA, 23 bp, Homo sapiens
tgagactctcctgtgcagcctct

SEQ ID NO: 5610 - DNA, 25 bp, Homo sapiens
cctgagactctcctgtgcagcctct

SEQ ID NO: 5611 - DNA, 72 bp, Homo sapiens
gtgcagctggtggagtctgggggaggcgtggtacagcctggggggtccctgagactctcctgtgcagcctct

SEQ ID NO: 5612 - DNA, 74 bp, Homo sapiens
aggtgcagctggtggagtctgggggaggcttggtcaagcctggagggtccctgagactctcctgtgcagtctct

SEQ ID NO: 5613 - DNA, 71 bp, Homo sapiens; identical to SEQ ID NO: 5563

SEQ ID NO: 5614 - DNA, 25 bp, Homo sapiens
cctgagactctcctgtgcagcgtct

SEQ ID NO: 5615 - DNA, 23 bp, Homo sapiens
tgagactctcctgtgcagcctct

SEQ ID NO: 5616 - DNA, 23 bp, Homo sapiens
tgagactctcctgtgcagcctct

SEQ ID NO: 5617 - DNA, 36 bp, Homo sapiens
cgttcggagaccctgtccctcacctgcactgtctct

SEQ ID NO: 5618 - DNA, 75 bp, Homo sapiens; identical to SEQ ID NO: 1402

SEQ ID NO: 5619 - DNA, 19 bp, Homo sapiens
cctcacctgcactgtctct

SEQ ID NO: 5620 - DNA, 25 bp, Homo sapiens
cctgagactctcctgtgcagcctct

SEQ ID NO: 5621 - DNA, 37 bp, Homo sapiens
  modified_base (3)..(8): a, c, t, g, unknown or other
ccnnnnnnagtctctgaggatctcctgtaagacttct

SEQ ID NO: 5622 - DNA, 29 bp, Homo sapiens
agaccctgtccctcacctgcactgtctcc

SEQ ID NO: 5623 - DNA, 20 bp, Homo sapiens
aggtctcctgcaaggcttct

SEQ ID NO: 5624 - DNA, 25 bp, Homo sapiens
cctgagactctcctgtgcagcctct

SEQ ID NO: 5625 - DNA, 36 bp, Homo sapiens
ccttcggagaccctgtccctcacctgcactgtctct

SEQ ID NO: 5626 - DNA, 23 bp, Homo sapiens
tgagactctcctgtgcagcctct

SEQ ID NO: 5627 - DNA, 35 bp, Homo sapiens
tttcggagaccctgtccctcacctgcactgtctct

SEQ ID NO: 5628 - DNA, 25 bp, Homo sapiens
cctgtccctcacctgcactgtctct

SEQ ID NO: 5629 - DNA, 16 bp, Homo sapiens
cacctgcactgtctct

SEQ ID NO: 5630 - DNA, 34 bp, Homo sapiens
ttcggagaccctgtccctcacctgcactgtctct

SEQ ID NO: 5631 - DNA, 25 bp, Homo sapiens
cctgagactctcctgtgcagcctct

SEQ ID NO: 5632 - DNA, 25 bp, Homo sapiens
cctgagactctcctgtgcagcgtct

SEQ ID NO: 5633 - DNA, 25 bp, Homo sapiens
cctgagactctcctgtgcagcctct

SEQ ID NO: 5634 - DNA, 25 bp, Homo sapiens
cctgagactctcctgtgcagcctct

SEQ ID NO: 5635 - DNA, 34 bp, Homo sapiens
tggggcctcagtgaatgtctcctgcaaggcttct

SEQ ID NO: 5636 - DNA, 24 bp, Homo sapiens
ggaggcaccttcagcagctatgcc

SEQ ID NO: 5637 - DNA, 24 bp, Homo sapiens
ggtgcctccatcagaaactactac

SEQ ID NO: 5638 - DNA, 24 bp, Homo sapiens
ggattcatcttcagtagcttcgct

SEQ ID NO: 5639 - DNA, 24 bp, Homo sapiens
ggattcaccctcagtagttacggc

SEQ ID NO: 5640 - DNA, 24 bp, Homo sapiens
gggttcaccttcagtggctcttct

SEQ ID NO: 5641 - DNA, 24 bp, Homo sapiens
ggattcgccttcaatacgtatgct

SEQ ID NO: 5642 - DNA, 24 bp, Homo sapiens
cgattcaacttcaataactatgcc

SEQ ID NO: 5643 - DNA, 24 bp, Homo sapiens
ggtgcctccatcagaagttactac

SEQ ID NO: 5644 - DNA, 24 bp, Homo sapiens
ggatacagcgtcaccagctattgg

SEQ ID NO: 5645 - DNA, 24 bp, Homo sapiens
gggttcacctttagtttgtattgg

SEQ ID NO: 5646 - DNA, 24 bp, Homo sapiens
ggattcaccctcaataactatggc

SEQ ID NO: 5647 - DNA, 24 bp, Homo sapiens
ggatacaccttcagaaattttgat

SEQ ID NO: 5648 - DNA, 24 bp, Homo sapiens
ggatacagctttaccagctactgg

SEQ ID NO: 5649 - DNA, 30 bp, Homo sapiens
ggtggctccatcagcagaggtggatttacc

SEQ ID NO: 5650 - DNA, 24 bp, Homo sapiens
ggatccatttttactattccttgg

SEQ ID NO: 5651 - DNA, 24 bp, Homo sapiens
ggattcacctttaataactattgg

SEQ ID NO: 5652 - DNA, 24 bp, Homo sapiens
ggatccatcttcaatattccttgg

SEQ ID NO: 5653 - DNA, 24 bp, Homo sapiens
ggattcatctttagtcactatgcc

SEQ ID NO: 5654 - DNA, 24 bp, Homo sapiens
ggattcactttcagagacttctac

SEQ ID NO: 5655 - DNA, 24 bp, Homo sapiens
ggattcacgtttagtggctattgg

SEQ ID NO: 5656 - DNA, 24 bp, Homo sapiens
ggatacaccttcaacatgcactat

SEQ ID NO: 5657 - DNA, 24 bp, Homo sapiens
ggatacaccttcactacctattct

SEQ ID NO: 5658 - DNA, 24 bp, Homo sapiens
ggattcatcttcagtaactatgcc

SEQ ID NO: 5659 - DNA, 24 bp, Homo sapiens
ggattcacctttagcaactctgcc

SEQ ID NO: 5660 - DNA, 24 bp, Homo sapiens
ggattctcctttagtacttattgg

SEQ ID NO: 5661 - DNA, 30 bp, Homo sapiens
ggtggctccgtcaccagtggcatttaccac

SEQ ID NO: 5662 - DNA, 24 bp, Homo sapiens
ggtgagtcgttaagcggctacttc

SEQ ID NO: 5663 - DNA, 24 bp, Homo sapiens
gaagacaccttcagcacctatgtt

SEQ ID NO: 5664 - DNA, 24 bp, Homo sapiens
ggattcacctttagtcactattgg

SEQ ID NO: 5665 - DNA, 24 bp, Homo sapiens
gaagacaccttcagcacctatgtt

SEQ ID NO: 5666 - DNA, 24 bp, Homo sapiens
ggattcaccttcagtagttatggc

SEQ ID NO: 5667 - DNA, 30 bp, Homo sapiens
ggtgcctccatcaccaatgctgattcttgg

SEQ ID NO: 5668 - DNA, 24 bp, Homo sapiens
ggattcagcttcagtaactatggc

SEQ ID NO: 5669 - DNA, 24 bp, Homo sapiens
ggatacaccttcaccggctattat

SEQ ID NO: 5670 - DNA, 24 bp, Homo sapiens
ggattcacctttgacgattctgcc

SEQ ID NO: 5671 - DNA, 24 bp, Homo sapiens
ggattcacctttgagcattatgcc

SEQ ID NO: 5672 - DNA, 24 bp, Homo sapiens
ggactcatcttcagtaactactac

SEQ ID NO: 5673 - DNA, 24 bp, Homo sapiens
ggattcacctttgatgattatgcc

SEQ ID NO: 5674 - DNA, 24 bp, Homo sapiens
ggattcaccttcagagtctatggc

SEQ ID NO: 5675 - DNA, 21 bp, Homo sapiens
tacaccttcaccacctactgg

SEQ ID NO: 5676 - DNA, 24 bp, Homo sapiens
ggattcacctttaatgattatgcc

SEQ ID NO: 5677 - DNA, 24 bp, Homo sapiens
ggattcatctttgatgattatgcc

SEQ ID NO: 5678 - DNA, 24 bp, Homo sapiens
ggattcatcttcactagctattgg

SEQ ID NO: 5679 - DNA, 24 bp, Homo sapiens
ggattcagttttgaggaatatggc

SEQ ID NO: 5680 - DNA, 11 bp, Homo sapiens
gcagctttgct

SEQ ID NO: 5681 - DNA, 24 bp, Homo sapiens
ggattcagcttcagtagctatggc

SEQ ID NO: 5682 - DNA, 30 bp, Homo sapiens
ggtgactccatcagcagtggtggctactac

SEQ ID NO: 5683 - DNA, 24 bp, Homo sapiens
ggattcacctttgacgatgctgcc

SEQ ID NO: 5684 - DNA, 24 bp, Homo sapiens
ggcttcacttttagtaaatatggc

SEQ ID NO: 5685 - DNA, 30 bp, Homo sapiens
ggtggctccatcagtggtggtaattactac

SEQ ID NO: 5686 - DNA, 24 bp, Homo sapiens
ggattcactttcagtagcgatggc

SEQ ID NO: 5687 - DNA, 24 bp, Homo sapiens
ggattcacattcagtgactactac

SEQ ID NO: 5688 - DNA, 24 bp, Homo sapiens
ttcaccagatactttatacattgg

SEQ ID NO: 5689 - DNA, 30 bp, Homo sapiens
  modified_base (24)..(24): a, c, t, g, unknown or other
ggaggctccatcaccaccggtagntattac

SEQ ID NO: 5690 - DNA, 24 bp, Homo sapiens
ggattcaccttcagtagttatgac

SEQ ID NO: 5691 - DNA, 24 bp, Homo sapiens
ggtttcaccttcagtagttatggc

SEQ ID NO: 5692 - DNA, 24 bp, Homo sapiens
ggattcacctttagcacctatgcc

SEQ ID NO: 5693 - DNA, 24 bp, Homo sapiens
gggttcgcctttagcaattatgtc

SEQ ID NO: 5694 - DNA, 24 bp, Homo sapiens
ggattcacttttagtcgttattgg

SEQ ID NO: 5695 - DNA, 24 bp, Homo sapiens
ggattcacctttggtgattatgct

SEQ ID NO: 5696 - DNA, 27 bp, Homo sapiens
agttactccatcaccagtggttactac

SEQ ID NO: 5697 - DNA, 24 bp, Homo sapiens
ggttacacttttaccagttatggt

SEQ ID NO: 5698 - DNA, 24 bp, Homo sapiens
ggatacaggttcaccgactactat

SEQ ID NO: 5699 - DNA, 24 bp, Homo sapiens
ggtgcctccatcagtagttactac

SEQ ID NO: 5700 - DNA, 27 bp, Homo sapiens
ggcgcctccgtcactagtaacaattgg

SEQ ID NO: 5701 - DNA, 30 bp, Homo sapiens
ggtgactccatcattacgagcacttactac

SEQ ID NO: 5702 - DNA, 24 bp, Homo sapiens
ggattcaccgtcagtagtaacttc

SEQ ID NO: 5703 - DNA, 24 bp, Homo sapiens
ggatttattttcagtgaatattgg

SEQ ID NO: 5704 - DNA, 27 bp, Homo sapiens
ggtagctccatcagcaggggttactac

SEQ ID NO: 5705 - DNA, 24 bp, Homo sapiens
ggattcactttccattatgcctgg

SEQ ID NO: 5706 - DNA, 24 bp, Homo sapiens
ggaggcagcttcaataattttgct

SEQ ID NO: 5707 - DNA, 24 bp, Homo sapiens
ggaggcgacttcaacaactttgct

SEQ ID NO: 5708 - DNA, 24 bp, Homo sapiens
ggattcacctttagcacgtatgcc

SEQ ID NO: 5709 - DNA, 24 bp, Homo sapiens
ggattcaatttacatagttatgaa

SEQ ID NO: 5710 - DNA, 20 bp, Homo sapiens
tcaccttcactgacttctac

SEQ ID NO: 5711 - DNA, 24 bp, Homo sapiens
ggattcactttcaccaacgcctgg

SEQ ID NO: 5712 - DNA, 24 bp, Homo sapiens
ggagccatcttcaacaactatgct

SEQ ID NO: 5713 - DNA, 24 bp, Homo sapiens
ggtttccccttcaataactttgcc

SEQ ID NO: 5714 - DNA, 24 bp, Homo sapiens
ggatacaggctcaccaggtactac

SEQ ID NO: 5715 - DNA, 24 bp, Homo sapiens
ggattcacctttagtacctattgg

SEQ ID NO: 5716 - DNA, 24 bp, Homo sapiens
ggattcagcttcagtgattctgaa

SEQ ID NO: 5717 - DNA, 24 bp, Homo sapiens
ggtggctccatcagtactcactat

SEQ ID NO: 5718 - DNA, 24 bp, Homo sapiens
gattacacctttaccagttatggt

SEQ ID NO: 5719 - DNA, 24 bp, Homo sapiens
ggaggcgccttcaggaactttgct

SEQ ID NO: 5720 - DNA, 24 bp, Homo sapiens
ggacgcaacttcaacaactttgct

SEQ ID NO: 5721 - DNA, 24 bp, Homo sapiens
ggactgagcttcagtgactacttc

SEQ ID NO: 5722 - DNA, 24 bp, Homo sapiens
ggaggcaccttcaacaactttgca

SEQ ID NO: 5723 - DNA, 24 bp, Homo sapiens
ggaggcgacttcaacaactttgct

SEQ ID NO: 5724 - DNA, 24 bp, Homo sapiens
ggattcgcctttagtagttatggc

SEQ ID NO: 5725 - DNA, 24 bp, Homo sapiens
ggattcaccttcaccacctctgcc

SEQ ID NO: 5726 - DNA, 24 bp, Homo sapiens
ggattcagttttagtagttattgg

SEQ ID NO: 5727 - DNA, 24 bp, Homo sapiens
ggattcacttttagtgccgcctgg

SEQ ID NO: 5728 - DNA, 24 bp, Homo sapiens
ggattcatctttagtaattattgg

SEQ ID NO: 5729 - DNA, 24 bp, Homo sapiens
ggtggctccatgagtcctttttat

SEQ ID NO: 5730 - DNA, 24 bp, Homo sapiens
ggaggcaccttcaccaactatgct

SEQ ID NO: 5731 - DNA, 24 bp, Homo sapiens
ggatacaattttgccggctactgg

SEQ ID NO: 5732 - DNA, 24 bp, Homo sapiens
ggatacaccttcaccggctacttt

SEQ ID NO: 5733 - DNA, 30 bp, Homo sapiens
ggtgtcgccgtcaacactgatctttactac

SEQ ID NO: 5734 - DNA, 30 bp, Homo sapiens
ggtggctccatcagcggtagtggttacttc

SEQ ID NO: 5735 - DNA, 24 bp, Homo sapiens
ggattcagctttagtagctattgg

SEQ ID NO: 5736 - DNA, 22 bp, Homo sapiens
tgtctctagcgacactgctgct

SEQ ID NO: 5737 - DNA, 24 bp, Homo sapiens
ggattcacctttagtaactatccc

SEQ ID NO: 5738 - DNA, 24 bp, Homo sapiens
ggatccacctctaccagctttccc

SEQ ID NO: 5739 - DNA, 24 bp, Homo sapiens
ggtggcaccttcgacacttacgct

SEQ ID NO: 5740 - DNA, 30 bp, Homo sapiens
ggtggctccttcagcagtaatgcttactac

SEQ ID NO: 5741 - DNA, 24 bp, Homo sapiens
ggagtcaccttcagcagttatgct

SEQ ID NO: 5742 - DNA, 24 bp, Homo sapiens
ggaggcactttcagcagtcgcgca

SEQ ID NO: 5743 - DNA, 24 bp, Homo sapiens
ggattcaccttcagaagctttgcc

SEQ ID NO: 5744 - DNA, 24 bp, Homo sapiens
ggattcactttcactcacgcctgg

SEQ ID NO: 5745 - DNA, 24 bp, Homo sapiens
ggattctccttcagtgattattac

SEQ ID NO: 5746 - DNA, 24 bp, Homo sapiens
ggattcatttttagtagctattgg

SEQ ID NO: 5747 - DNA, 24 bp, Homo sapiens
ggattcaactttgatgattatgcc

SEQ ID NO: 5748 - DNA, 24 bp, Homo sapiens
ggatacactttcagcggctactat

SEQ ID NO: 5749 - DNA, 24 bp, Homo sapiens
ggattcccattcattaacgcctac

SEQ ID NO: 5750 - DNA, 30 bp, Homo sapiens
ggtgcctccatgaatagtgaagccttctac

SEQ ID NO: 5751 - DNA, 30 bp, Homo sapiens
ggtggctccatcagcagtagtagttactac

SEQ ID NO: 5752 - DNA, 24 bp, Homo sapiens
ggatacaccttcaccggctactat

SEQ ID NO: 5753 - DNA, 30 bp, Homo sapiens; identical to SEQ ID NO: 5751

SEQ ID NO: 5754 - DNA, 24 bp, Homo sapiens
gggttcaggtttagcacctttgcc

SEQ ID NO: 5755 - DNA, 30 bp, Homo sapiens; identical to SEQ ID NO: 5751

SEQ ID NO: 5756 - DNA, 24 bp, Homo sapiens
ggattcaccttcagtagctatggc

SEQ ID NO: 5757 - DNA, 24 bp, Homo sapiens
ggtggctccatcagttattactac

SEQ ID NO: 5758 - DNA, 24 bp, Homo sapiens
ggattcacctttggtgattatgct

SEQ ID NO: 5759 - DNA, 30 bp, Homo sapiens
ggtggctccatcagcagtggtggttactac

SEQ ID NO: 5760 - DNA, 24 bp, Homo sapiens
ggattcacctttgatgattatgcc

SEQ ID NO: 5761 - DNA, 24 bp, Homo sapiens
ggatacaccttcatcggctactat

SEQ ID NO: 5762 - DNA, 30 bp, Homo sapiens; identical to SEQ ID NO: 5751

SEQ ID NO: 5763 - DNA, 30 bp, Homo sapiens; identical to SEQ ID NO: 5751

SEQ ID NO: 5764 - DNA, 24 bp, Homo sapiens
ggattcaccttcagtacctatggc

SEQ ID NO: 5765 - DNA, 24 bp, Homo sapiens
ggattcaagttcagtgactatggc

SEQ ID NO: 5766 - DNA, 24 bp, Homo sapiens
ggttacacctttaccagctatggt

SEQ ID NO: 5767 - DNA, 24 bp, Homo sapiens
ggattcaccttcagtgactactac

SEQ ID NO: 5768 - DNA, 30 bp, Homo sapiens; identical to SEQ ID NO: 5759

SEQ ID NO: 5769 - DNA, 24 bp, Homo sapiens
ggatacagctttaccagctactgg

SEQ ID NO: 5770 - DNA, 24 bp, Homo sapiens
ggattcaccttcagtagctatggc

SEQ ID NO: 5771 - DNA, 24 bp, Homo sapiens
ggattcacctttgatgattatgcc

SEQ ID NO: 5772 - DNA, 24 bp, Homo sapiens
ggattcacctttagtagctattgg

SEQ ID NO: 5773 - DNA, 24 bp, Homo sapiens
gggttcagtgtcaggagcaactac

SEQ ID NO: 5774 - DNA, 24 bp, Homo sapiens
ggatacaccttcaccggctactat

SEQ ID NO: 5775 - DNA, 24 bp, Homo sapiens
ggattcacctttgatgattatgcc

SEQ ID NO: 5776 - DNA, 30 bp, Homo sapiens
  modified_base (29)..(29): a, c, t, g, unknown or other
ggtggctccatcagcagtggtggttactnc

SEQ ID NO: 5777 - DNA, 24 bp, Homo sapiens
ggtggctccatcagtaattactat

SEQ ID NO: 5778 - DNA, 24 bp, Homo sapiens
ggatacaccttcaccggctactat

SEQ ID NO: 5779 - DNA, 30 bp, Homo sapiens; identical to SEQ ID NO: 5751

SEQ ID NO: 5780 - DNA, 24 bp, Homo sapiens
ggattcaccttcagtagctacgac

SEQ ID NO: 5781 - DNA, 24 bp, Homo sapiens
ggattcacctttgatgattatgcc

SEQ ID NO: 5782 - DNA, 24 bp, Homo sapiens
ggattcaccttcagtagctatggc

SEQ ID NO: 5783 - DNA, 24 bp, Homo sapiens
ggattcattttcaataacgcctgg

SEQ ID NO: 5784 - DNA, 30 bp, Homo sapiens
ggtggctccatcagcagtagtaattactac

SEQ ID NO: 5785 - DNA, 24 bp, Homo sapiens
ggattcaccttcagtagctatcct

SEQ ID NO: 5786 - DNA, 30 bp, Homo sapiens; identical to SEQ ID NO: 5751

SEQ ID NO: 5787 - DNA, 30 bp, Homo sapiens; identical to SEQ ID NO: 5751

SEQ ID NO: 5788 - DNA, 24 bp, Homo sapiens
ggatacagcttcaccagttactgg

SEQ ID NO: 5789 - DNA, 30 bp, Homo sapiens
  modified_base (24)..(24): a, c, t, g, unknown or other
ggtggctccatcagcagtagtagntactac

SEQ ID NO: 5790 - DNA, 30 bp, Homo sapiens
gatggctccatcagcagtagtagttactac

SEQ ID NO: 5791 - DNA, 30 bp, Homo sapiens; identical to SEQ ID NO: 5759

SEQ ID NO: 5792 - DNA, 24 bp, Homo sapiens
ggattcaccttcagtagatatggc

SEQ ID NO: 5793 - DNA, 24 bp, Homo sapiens
ggattcaccttcagtgactactac

SEQ ID NO: 5794 - DNA, 30 bp, Homo sapiens
ggtggctccatcgacactgctgattattac

SEQ ID NO: 5795 - DNA, 24 bp, Homo sapiens
ggattcaccttcagtgactactac

SEQ ID NO: 5796 - DNA, 24 bp, Homo sapiens
ggattcaccttcagtagctatagc

SEQ ID NO: 5797 - DNA, 24 bp, Homo sapiens
ggattcaccttcagtagctatagc

SEQ ID NO: 5798 - DNA, 24 bp, Homo sapiens
ggattcaccttcagtgactactac

SEQ ID NO: 5799 - DNA, 24 bp, Homo sapiens
ggattcacctttgatgattatgcc

SEQ ID NO: 5800 - DNA, 24 bp, Homo sapiens
ggattcaccttcagtgactactac

SEQ ID NO: 5801 - DNA, 30 bp, Homo sapiens; identical to SEQ ID NO: 5751

SEQ ID NO: 5802 - DNA, 24 bp, Homo sapiens
ggattcaccttcagtacctatggc

SEQ ID NO: 5803 - DNA, 24 bp, Homo sapiens
ggattcaccttcagtagttatgaa

SEQ ID NO: 5804 - DNA, 24 bp, Homo sapiens
ggattcaccttcagtagctatagc

SEQ ID NO: 5805 - DNA, 24 bp, Homo sapiens
ggatacaccttcaccagctactat

SEQ ID NO: 5806 - DNA, 30 bp, Homo sapiens; identical to SEQ ID NO: 5751

SEQ ID NO: 5807 - DNA, 30 bp, Homo sapiens
ggtggctccatcagcagtggtgattactac

SEQ ID NO: 5808 - DNA, 24 bp, Homo sapiens
ggtgactccatcagtaattattac

SEQ ID NO: 5809 - DNA, 24 bp, Homo sapiens
ggattcaccttcagtgactactac

SEQ ID NO: 5810 - DNA, 24 bp, Homo sapiens
ggatacaggtttaccacctactgg

SEQ ID NO: 5811 - DNA, 24 bp, Homo sapiens
ggtggctccatcagcagttacttc

SEQ ID NO: 5812 - DNA, 24 bp, Homo sapiens
ggatacaccttcaccggctactat

SEQ ID NO: 5813 - DNA, 24 bp, Homo sapiens
ggattcaccttcagtgactactac

SEQ ID NO: 5814 - DNA, 30 bp, Homo sapiens; identical to SEQ ID NO: 5751

SEQ ID NO: 5815 - DNA, 24 bp, Homo sapiens
ggattcaccttcagtagctatagc

SEQ ID NO: 5816 - DNA, 30 bp, Homo sapiens; identical to SEQ ID NO: 5751

SEQ ID NO: 5817 - DNA, 30 bp, Homo sapiens
  modified_base (18)..(20): a, c, t, g, unknown or other
ggtggctccatcagctgnnntggttactac

SEQ ID NO: 5818 - DNA, 30 bp, Homo sapiens
  modified_base (7)..(7): a, c, t, g, unknown or other
ggtggcnccatcagcagtagtagttactac

SEQ ID NO: 5819 - DNA, 30 bp, Homo sapiens; identical to SEQ ID NO: 5751

SEQ ID NO: 5820 - DNA, 24 bp, Homo sapiens
ggattcaccttcagtagctatggc

SEQ ID NO: 5821 - DNA, 24 bp, Homo sapiens
ggattcaccttcagtggctatgac

SEQ ID NO: 5822 - DNA, 24 bp, Homo sapiens
ggattcaccttcagtagctatagc

SEQ ID NO: 5823 - DNA, 24 bp, Homo sapiens
ggattcaccttcagtgactactac

SEQ ID NO: 5824 - DNA, 24 bp, Homo sapiens
ggatacaccttcaccggctactat

SEQ ID NO: 5825 - DNA, 51 bp, Homo sapiens
atcagttgggtgcgacaggcccctggacaagggcttgagtggatgggaggg

SEQ ID NO: 5826 - DNA, 51 bp, Homo sapiens
atcagctgggtgcgacaggcccctggacaaggacttcagtggatgggaggg

SEQ ID NO: 5827 - DNA, 51 bp, Homo sapiens
tggagctggatccggcagcccccagggaagggactggagtggattgggtct

SEQ ID NO: 5828 - DNA, 51 bp, Homo sapiens
atgcactgggtccggcaagttccagggaagggcctggaatgggtctcaggt

SEQ ID NO: 5829 - DNA, 51 bp, Homo sapiens
atgcactgggtccgccaggctccaggcaaggggctggagtgggtggcactg

SEQ ID NO: 5830 - DNA, 51 bp, Homo sapiens
atgcactgggtccgccaggctccaggcaaggggctggagtgggtggcactt

SEQ ID NO: 5831 - DNA, 32 bp, Homo sapiens
  modified_base (6)..(6): a, c, t, g, unknown or other
  modified_base (26)..(26): a, c, t, g, unknown or other
  modified_base (28)..(29): a, c, t, g, unknown or other
ccccangggagggactggagtggatngnngaa

SEQ ID NO: 5832 - DNA, 51 bp, Homo sapiens
attcactgggtccgccaggctcccgggaaagggctggagtgggttggccgt

SEQ ID NO: 5833 - DNA, 51 bp, Homo sapiens; identical to SEQ ID NO: 5830

SEQ ID NO: 5834 - DNA, 51 bp, Homo sapiens; identical to SEQ ID NO: 1634

SEQ ID NO: 5835 - DNA, 51 bp, Homo sapiens; identical to SEQ ID NO: 5827

SEQ ID NO: 5836 - DNA, 51 bp, Homo sapiens
atcggctgggtgcgccagatgcccgggaagggcctggagtggatgggggtc

SEQ ID NO: 5837 - DNA, 51 bp, Homo sapiens; identical to SEQ ID NO: 1561

SEQ ID NO: 5838 - DNA, 51 bp, Homo sapiens
atgcactgggtccgccaggctccaggcagggggctggagtgggtggcagtt

SEQ ID NO: 5839 - DNA, 51 bp, Homo sapiens
atcaactgggtgcgacaggcccctggacaagggcttgagtggatgggatgg

SEQ ID NO: 5840 - DNA, 51 bp, Homo sapiens
atcggctgggtgcgccagatgcccggaaaaggcctggagtggatggggatc

SEQ ID NO: 5841 - DNA, 51 bp, Homo sapiens
tggagttggattcggcagccaccagggaaggccctggagtggattgggtac

SEQ ID NO: 5842 - DNA, 51 bp, Homo sapiens
atgggctgggtccgccaggctccagggaaggggctggagtgggtggccaac

SEQ ID NO: 5843 - DNA, 26 bp, Homo sapiens
ggaaggggctggagtggattggggaa

SEQ ID NO: 5844 - DNA, 51 bp, Homo sapiens
atgagttgggtccgccagactccagggaaggggctggagtgggtggccaat

SEQ ID NO: 5845 - DNA, 51 bp, Homo sapiens
atgagctgggtccgccaaggtccagggaaggggctggagtgggtggccaac

SEQ ID NO: 5846 - DNA, 51 bp, Homo sapiens
atgaactgggcccgccaggctccagggaaggggctggagtgggtctcaggt

SEQ ID NO: 5847 - DNA, 51 bp, Homo sapiens
atgagctggatccgccaggttccagggaagggactggagtgggtttcatac

SEQ ID NO: 5848 - DNA, 51 bp, Homo sapiens
tggagctgggtccgacagcccccagggaagggacttgagtggcttggatat

SEQ ID NO: 5849 - DNA, 51 bp, Homo sapiens
  modified_base (5)..(5): a, c, t, g, unknown or other
  modified_base (17)..(17): a, c, t, g, unknown or other
atganctgggtccgccnggctccagggaaggggctggagtgggtggccact

SEQ ID NO: 5850 - DNA, 51 bp, Homo sapiens
atccactgggtgcgacaggcccctggacaaggccttgagtggatgggattc

SEQ ID NO: 5851 - DNA, 51 bp, Homo sapiens; identical to SEQ ID NO: 1575

SEQ ID NO: 5852 - DNA, 51 bp, Homo sapiens
atacactgggtccgccaggctccaggcaaggggctggactgggtgtcaggt

SEQ ID NO: 5853 - DNA, 51 bp, Homo sapiens
atgagctgggtccgccaggctccagggaaggggctggagtgggtctcaagt

SEQ ID NO: 5854 - DNA, 39 bp, Homo sapiens
  modified_base (10)..(10): a, c, t, g, unknown or other
  modified_base (12)..(13): a, c, t, g, unknown or other
cgccagcccncnnggaagggcctggagtggcttgcctac

SEQ ID NO: 5855 - DNA, 51 bp, Homo sapiens
atgaactgggtccgccagattccagggaaggggctggagtgggtggccaac

SEQ ID NO: 5856 - DNA, 51 bp, Homo sapiens
tggacctggattcgacagcccccagggaagggactggagtggattggatat

SEQ ID NO: 5857 - DNA, 51 bp, Homo sapiens
tggaactggattcgccagtccccagggaagggcctggagtggattggggag

SEQ ID NO: 5858 - DNA, 51 bp, Homo sapiens
atgcactgggtgcgacaggcccctggacaagggcttgagtggatgggagaa

SEQ ID NO: 5859 - DNA, 51 bp, Homo sapiens
gtggcctggctccgccaggctccagaaaaggggctggagtggctggcccaa

SEQ ID NO: 5860 - DNA, 51 bp, Homo sapiens; identical to SEQ ID NO: 5858

SEQ ID NO: 5861 - DNA, 51 bp, Homo sapiens
atgcactgggtccgccaggctccaggcaaggggctggagtgggtgtcactt

SEQ ID NO: 5862 - DNA, 51 bp, Homo sapiens
tggaattggatccgccagtccccagggaagggcctggagtggattggctac

SEQ ID NO: 5863 - DNA, 51 bp, Homo sapiens; identical to SEQ ID NO: 1634

SEQ ID NO: 5864 - DNA, 51 bp, Homo sapiens
gtacactgggtgcgacaggcccctggacaagggcttgagtggatgggatgg

SEQ ID NO: 5865 - DNA, 51 bp, Homo sapiens
attcactgggtccggcaacctccagggaagggcctggagtgggtctcaagt

SEQ ID NO: 5866 - DNA, 51 bp, Homo sapiens
atgcactgggtccgtcaagctccagggaagggtctggagtgggtctctctt

SEQ ID NO: 5867 - DNA, 26 bp, Homo sapiens
  modified_base (17)..(18): a, c, t, g, unknown or other
ggaaggggctggagtgnntttcatac

SEQ ID NO: 5868 - DNA, 51 bp, Homo sapiens
atgagctggatccgccaggctccagggaaggggctggagggtgtttcctac

SEQ ID NO: 5869 - DNA, 51 bp, Homo sapiens; identical to SEQ ID NO: 1630

SEQ ID NO: 5870 - DNA, 51 bp, Homo sapiens
ttccactgggtccgccaggctccaggcaaggggctggagtgggtggcagct

SEQ ID NO: 5871 - DNA, 51 bp, Homo sapiens
ctcggctgggtgcgccagatgcccggggaaggcctggagtggatggggatc

SEQ ID NO: 5872 - DNA, 12 bp, Homo sapiens
tgggtggcagta

SEQ ID NO: 5873 - DNA, 51 bp, Homo sapiens
tgtggctggatccgccagccccccgggaagggactggagtgggttggaagt

SEQ ID NO: 5874 - DNA, 51 bp, Homo sapiens
atgcactgggtccggcaagctccacggaagggcctggagtgggtctcaact

SEQ ID NO: 5875 - DNA, 51 bp, Homo sapiens
atgtactgggtccggcaagctccagggaagggcctggagtgggtcgcaggt

SEQ ID NO: 5876 - DNA, 51 bp, Homo sapiens
atgcactgggtccgccaagctccagggaaggggctggtgtgggtctcacgt

SEQ ID NO: 5877 - DNA, 51 bp, Homo sapiens
atgcactgggtccggcaagctccagggaagggcccggagtgggtctcattt

SEQ ID NO: 5878 - DNA, 51 bp, Homo sapiens
atcagctgggtgcgacaggcccctggacaagggcttgaatggatgggaggc

SEQ ID NO: 5879 - DNA, 51 bp, Homo sapiens
atgcactgggtccgccaggctccaggcaaggggctggagcctgtggcaatt

SEQ ID NO: 5880 - DNA, 51 bp, Homo sapiens
tggaactggatccgccagtccccagggaagggccttgagtggattgggtac

SEQ ID NO: 5881 - DNA, 51 bp, Homo sapiens
atgcactgggtccggcatcgtccagggaagggcctggagtgggtctcaagt

SEQ ID NO: 5882 - DNA, 51 bp, Homo sapiens
  modified_base (1)..(1): a, c, t, g, unknown or other
ntagactgggtccgccaggctccagggaaggggctggagtgggtctcagga

SEQ ID NO: 5883 - DNA, 51 bp, Homo sapiens
tggacctggatccggcagcccgccgggaagggactggagtggattgggcgt

SEQ ID NO: 5884 - DNA, 51 bp, Homo sapiens
atgcactgggtccgccaggctccaggcaaggggctggagtgggtggctttt

SEQ ID NO: 5885 - DNA, 51 bp, Homo sapiens
atgagttggatccgccaggctcctgggaaggggccggagtggatttcatcc

SEQ ID NO: 5886 - DNA, 51 bp, Homo sapiens
gtgcgacaggcccctggacaggggcttgagtggatgggaatgatcaaccct

SEQ ID NO: 5887 - DNA, 51 bp, Homo sapiens
tgggcctggatccggcagcccgccgggaagggtctggagtgggttgggcgc

SEQ ID NO: 5888 - DNA, 51 bp, Homo sapiens
atgaattgggtccgccaggctccagggaaggggctggagtggatttcatac

SEQ ID NO: 5889 - DNA, 51 bp, Homo sapiens
atgcactgggtccgccaggctccaggcaaggggctggagtgggtggcattt

SEQ ID NO: 5890 - DNA, 51 bp, Homo sapiens
atgtcctgggtccgccaggctccagggaaggggctggagtgggtctcaact

SEQ ID NO: 5891 - DNA, 51 bp, Homo sapiens
atggcctgggtccgccaggctccagggaaggggctggagtgggtctcaaat

SEQ ID NO: 5892 - DNA, 51 bp, Homo sapiens
atgagctgggtccgccagactccagggaaagggttggagtgggtggccaac

SEQ ID NO: 5893 - DNA, 51 bp, Homo sapiens
ttgagctgggtccgccaggctccagggaaggggctggagtgggtaggtttc

SEQ ID NO: 5894 - DNA, 51 bp, Homo sapiens
tggggctgggtccggcagcccccagggaaggggctggagtggattgcaagt

SEQ ID NO: 5895 - DNA, 51 bp, Homo sapiens; identical to SEQ ID NO: 1598

SEQ ID NO: 5896 - DNA, 51 bp, Homo sapiens
atagtctggatgcgacaggcccctggacaagggcttgagcgaatgggacgg

SEQ ID NO: 5897 - DNA, 51 bp, Homo sapiens
tggaattggatccggcagcccccagggaagggactggagtggattggttat

SEQ ID NO: 5898 - DNA, 51 bp, Homo sapiens
tggatctgggtccgccagccccccgggaaggggctagagtggattggggaa

SEQ ID NO: 5899 - DNA, 51 bp, Homo sapiens
tggggctggatccgtcagtccccagggaaggggctggagtggattggcagt

SEQ ID NO: 5900 - DNA, 51 bp, Homo sapiens
atgagttgggtccgccgggctccagggaaggggctggaatgggtgtcagtt

SEQ ID NO: 5901 - DNA, 51 bp, Homo sapiens
atgcagtgggtccggcagaccccagggaaggggctggagtgggtggccaac

SEQ ID NO: 5902 - DNA, 51 bp, Homo sapiens
tgggcctggatccggcagcccccagggaaggggctggagtggattgggagt

SEQ ID NO: 5903 - DNA, 51 bp, Homo sapiens
atgagttgggtccgccacagtccagggaaggggctggagtgggttggccgc

SEQ ID NO: 5904 - DNA, 51 bp, Homo sapiens
atcaactgggtgcgacaggcccctggacaagggcttgagtggatgggaggg

SEQ ID NO: 5905 - DNA, 51 bp, Homo sapiens
atcaactgggtgcgacaggcccctggacaagggcttgagtggatgggggga

SEQ ID NO: 5906 - DNA, 51 bp, Homo sapiens
atgagctgggtccgccaggctccagggaaggggctggagtgggtctcagga

SEQ ID NO: 5907 - DNA, 51 bp, Homo sapiens
atgtattgggtccgccaggctccagggaaggggctggagtgggtctcattc

SEQ ID NO: 5908 - DNA, 51 bp, Homo sapiens
atgacatggatccgccagggtccaggcgaggggctggagtggatctcatac

SEQ ID NO: 5909 - DNA, 51 bp, Homo sapiens
  modified_base (1)..(1): a, c, t, g, unknown or other
ntgaactggatccgccaggctccagggaaggggctggagtgggttgcccgt

SEQ ID NO: 5910 - DNA, 51 bp, Homo sapiens
atcggctgggtgcggcaggcccctggacaagggcttgagtggatgggacag

SEQ ID NO: 5911 - DNA, 51 bp, Homo sapiens
atgcactgggtccgccaggctccagggaaggggctgcagtgggtctcctcc

SEQ ID NO: 5912 - DNA, 51 bp, Homo sapiens
atgcactgggtgcgacaggcccctggacaagggcttgagtggatgggagta

SEQ ID NO: 5913 - DNA, 51 bp, Homo sapiens
atgaagtgggtccgccaggctccagggaaggggcttgagtgcgtggccaac

SEQ ID NO: 5914 - DNA, 51 bp, Homo sapiens
atgaactgggtccgccaggctccagggaaggggctggagtgggttgcatat

SEQ ID NO: 5915 - DNA, 51 bp, Homo sapiens
tggagttggatccggcagaccccagggaaggggctggaatgcattggctat

SEQ ID NO: 5916 - DNA, 51 bp, Homo sapiens; identical to SEQ ID NO: 5839

SEQ ID NO: 5917 - DNA, 51 bp, Homo sapiens
atcagctgggtgcgacaggcccctggacaagggcttgagtggatgggaggg

SEQ ID NO: 5918 - DNA, 51 bp, Homo sapiens; identical to SEQ ID NO: 5904

SEQ ID NO: 5919 - DNA, 51 bp, Homo sapiens
atgagctgggtccgccaggcaccagggaggaggccggagtgggtggccaag

SEQ ID NO: 5920 - DNA, 51 bp, Homo sapiens
atgggctggatccgccaggctccagggaaggggccggagtggctttcatac

SEQ ID NO: 5921 - DNA, 51 bp, Homo sapiens
atcaactgggtgcgacaggcccccggacaagggcttgagtggatgggaggg

SEQ ID NO: 5922 - DNA, 51 bp, Homo sapiens
atcaactgggttcgacaggcccctggacaagggcttgagtggatgggaggt

SEQ ID NO: 5923 - DNA, 51 bp, Homo sapiens
atgacttgggtccgccaggctccagggaaggggctggagtgggtctcggct

SEQ ID NO: 5924 - DNA, 51 bp, Homo sapiens
atgagttgggtccgccgggctccagggaaggggttggagtgggtctcaact

SEQ ID NO: 5925 - DNA, 51 bp, Homo sapiens
atgacctgggtccgccaggctccagggaaggggctggagtgggtggccaac

SEQ ID NO: 5926 - DNA, 51 bp, Homo sapiens
atgaactgggtccgccagactcctgggaaggggctggagtgggttggccgt

SEQ ID NO: 5927 - DNA, 51 bp, Homo sapiens
atgacctgggtccgccaggctccagggaaggggctggagggggtggccaac

SEQ ID NO: 5928 - DNA, 51 bp, Homo sapiens
tggaactggatccggcagtccccaggaaagggactggaatggattggatat

SEQ ID NO: 5929 - DNA, 51 bp, Homo sapiens
ttcagctgggtgcgacaggcccctggacaagggcttgagtggatgggaggg

SEQ ID NO: 5930 - DNA, 51 bp, Homo sapiens
ttcggctgggtgcgccagaggcccggatacggcctggagtggatggggacc

SEQ ID NO: 5931 - DNA, 51 bp, Homo sapiens
atccactgggtgcgacaggcccctggacaagggcttgaatggatggggtgg

SEQ ID NO: 5932 - DNA, 22 bp, Homo sapiens
  modified_base (9)..(9): a, c, t, g, unknown or other
aggccttgngtggctgggaagg

SEQ ID NO: 5933 - DNA, 51 bp, Homo sapiens
tggagctgggtccggcaggccccagggaagggactggaatggattggttat

SEQ ID NO: 5934 - DNA, 51 bp, Homo sapiens
tggggctggatccgccagcccccaggggaggggctggaatggattgggact

SEQ ID NO: 5935 - DNA, 51 bp, Homo sapiens
atgacttgggtccgccaggctccagggaaggggctggagtgggtggccaac

SEQ ID NO: 5936 - DNA, 51 bp, Homo sapiens
  modified_base (3)..(3): a, c, t, g, unknown or other
tgnaactggatcaggcagtccccatcgagaggccttgagtggctgggaagg

SEQ ID NO: 5937 - DNA, 51 bp, Homo sapiens
attaggtgggtccgccaggctccagggaaggggctggagtgggtctcatct

SEQ ID NO: 5938 - DNA, 51 bp, Homo sapiens
atgagctgggtccgccagtctccagggatggggccggagtgggtctcaagt

SEQ ID NO: 5939 - DNA, 51 bp, Homo sapiens
ttcagctgggtgcgacaggcccctggacaaggccttgagtggatgggaggt

SEQ ID NO: 5940 - DNA, 51 bp, Homo sapiens
tgggactggatccgccagcccccagggaaggggccggagtggattgggagt

SEQ ID NO: 5941 - DNA, 51 bp, Homo sapiens; identical to SEQ ID NO: 5917

SEQ ID NO: 5942 - DNA, 51 bp, Homo sapiens
actagttgggtgcgacaggcccctggacaagggcttgagtggatgggagga

SEQ ID NO: 5943 - DNA, 51 bp, Homo sapiens
atgaactgggtccgccaggctccaggcaaggggctggagtgggtggcaggt

SEQ ID NO: 5944 - DNA, 51 bp, Homo sapiens
atgacctgggtccgccaggctccagggaagggcctggagtgggttggccgt

SEQ ID NO: 5945 - DNA, 51 bp, Homo sapiens
atgagctgggtccgccaggctcccgggaaggggctggactgggtttcatcc

SEQ ID NO: 5946 - DNA, 51 bp, Homo sapiens
atgacctgggtccgccaggctccagggaagggcctggagtgggtggccaac

SEQ ID NO: 5947 - DNA, 51 bp, Homo sapiens
atgcactgggtctggcaaactccagggaagggcctggagtgggtctcaggt

SEQ ID NO: 5948 - DNA, 51 bp, Homo sapiens
atgagctgggtgcgacaggcccctggacagggccttgagtggatgggatgg

SEQ ID NO: 5949 - DNA, 51 bp, Homo sapiens
  modified_base (39)..(39): a, c, t, g, unknown or other
tggggctgggtccgccagcccccggggaaggggctggantgggttgggagt

SEQ ID NO: 5950 - DNA, 51 bp, Homo sapiens
ttcagctgggtccgccaggctccagggaagggtctggagtgggttgctcgt

SEQ ID NO: 5951 - DNA, 51 bp, Homo sapiens
tggggctggatccgccagtccccaggcaaggggctggagtccattgggagt

SEQ ID NO: 5952 - DNA, 51 bp, Homo sapiens
tggggcgggatccgccagcccccagggaaggggctggagtggattgggagt

SEQ ID NO: 5953 - DNA, 51 bp, Homo sapiens
atgcactgggtgcgacaggcccctggacaagggcttgagtggatgggatgg

SEQ ID NO: 5954 - DNA, 51 bp, Homo sapiens
tggggctggatccgccagcccccagggaaggggctggagtggattgggagt

SEQ ID NO: 5955 - DNA, 51 bp, Homo sapiens
atgagctgggtccgccagtctccagggaaggggctggaatgggtctcagct

SEQ ID NO: 5956 - DNA, 51 bp, Homo sapiens; identical to SEQ ID NO: 5954

SEQ ID NO: 5957 - DNA, 51 bp, Homo sapiens; identical to SEQ ID NO: 1634

SEQ ID NO: 5958 - DNA, 51 bp, Homo sapiens
tggacctggattcggcagccccccgggaagggactgcagtggattgggttt

SEQ ID NO: 5959 - DNA, 51 bp, Homo sapiens
atgagctgggtccgccaggctccagggaaggggctggagtgggtaggtttc

SEQ ID NO: 5960 - DNA, 51 bp, Homo sapiens; identical to SEQ ID NO: 1584

SEQ ID NO: 5961 - DNA, 51 bp, Homo sapiens
atgcactgggtccgtcaagttccagggaagggtctggagtgggtctctctt

SEQ ID NO: 5962 - DNA, 51 bp, Homo sapiens; identical to SEQ ID NO: 5953

SEQ ID NO: 5963 - DNA, 51 bp, Homo sapiens; identical to SEQ ID NO: 5954

SEQ ID NO: 5964 - DNA, 51 bp, Homo sapiens; identical to SEQ ID NO: 5954

SEQ ID NO: 5965 - DNA, 51 bp, Homo sapiens; identical to SEQ ID NO: 1634

SEQ ID NO: 5966 - DNA, 51 bp, Homo sapiens
atgcactgggtccgccaggctccaggccaggggctgcaatgggtggcagtc

SEQ ID NO: 5967 - DNA, 51 bp, Homo sapiens; identical to SEQ ID NO: 1598

SEQ ID NO: 5968 - DNA, 51 bp, Homo sapiens
atgagctggatccgccaggctccagggaaggggctggagtgggtttcatac

SEQ ID NO: 5969 - DNA, 51 bp, Homo sapiens; identical to SEQ ID NO: 1584

SEQ ID NO: 5970 - DNA, 51 bp, Homo sapiens
atcagctgggtgcgccagatgcccgggaaaggcctggagtggatggggagg

SEQ ID NO: 5971 - DNA, 51 bp, Homo sapiens; identical to SEQ ID NO: 1634

SEQ ID NO: 5972 - DNA, 51 bp, Homo sapiens; identical to SEQ ID NO: 5866

SEQ ID NO: 5973 - DNA, 51 bp, Homo sapiens
atgagctgggtccgccaggctccagggaaggggctggagtgggtggccaac

SEQ ID NO: 5974 - DNA, 51 bp, Homo sapiens
ttgacctgggtccgccaggctccagggaaggggctggagtgggtctcagtt

SEQ ID NO: 5975 - DNA, 51 bp, Homo sapiens; identical to SEQ ID NO: 5953

SEQ ID NO: 5976 - DNA, 51 bp, Homo sapiens; identical to SEQ ID NO: 5866

SEQ ID NO: 5977 - DNA, 51 bp, Homo sapiens
  modified_base (3)..(3): a, c, t, g, unknown or other
tgnagctggatccgccagcacccagggaagggcctggagtggattgggtac

SEQ ID NO: 5978 - DNA, 51 bp, Homo sapiens
tggacctggatccggcagcccccagggaagggactggagtggattgggaat

SEQ ID NO: 5979 - DNA, 51 bp, Homo sapiens; identical to SEQ ID NO: 5953

SEQ ID NO: 5980 - DNA, 51 bp, Homo sapiens
tggggctggatccgccagcccccagggaaggggctggagtggattgggaat

SEQ ID NO: 5981 - DNA, 51 bp, Homo sapiens
atgcactgggtccgccaagctacaggaaaaggtctggagtgggtctcagct

SEQ ID NO: 5982 - DNA, 51 bp, Homo sapiens; identical to SEQ ID NO: 1630

SEQ ID NO: 5983 - DNA, 51 bp, Homo sapiens; identical to SEQ ID NO: 1634

SEQ ID NO: 5984 - DNA, 51 bp, Homo sapiens
atgagctgggtccgccagcctccagggaaggggctgcagtgggttggccat

SEQ ID NO: 5985 - DNA, 51 bp, Homo sapiens; identical to SEQ ID NO: 5954

SEQ ID NO: 5986 - DNA, 51 bp, Homo sapiens; identical to SEQ ID NO: 1632

SEQ ID NO: 5987 - DNA, 51 bp, Homo sapiens; identical to SEQ ID NO: 5954

SEQ ID NO: 5988 - DNA, 51 bp, Homo sapiens
tggggctggatccgccagccccccgggaagggactggagtggattgggagt

SEQ ID NO: 5989 - DNA, 51 bp, Homo sapiens
atcggctgggtgcgccagatgcccgggaaaggcctggagtggatgggggtc

SEQ ID NO: 5990 - DNA, 51 bp, Homo sapiens
  modified_base (31)..(31): a, c, t, g, unknown or other
tggggctggatccgccagcccccagggaagnggctggagtggattgggagt

SEQ ID NO: 5991 - DNA, 51 bp, Homo sapiens; identical to SEQ ID NO: 5954

SEQ ID NO: 5992 - DNA, 51 bp, Homo sapiens; identical to SEQ ID NO: 1584

SEQ ID NO: 5993 - DNA, 51 bp, Homo sapiens; identical to SEQ ID NO: 1634

SEQ ID NO: 5994 - DNA, 51 bp, Homo sapiens
  modified_base (5)..(5): a, c, t, g, unknown or other
atganctggatccgccaggctccagggaaggggctggagtgggtttcatac

SEQ ID NO: 5995 - DNA, 51 bp, Homo sapiens
tggagttggatccgccagcacccagggaagggcctggactttattgggtac

SEQ ID NO: 5996 - DNA, 51 bp, Homo sapiens; identical to SEQ ID NO: 5968

SEQ ID NO: 5997 - DNA, 51 bp, Homo sapiens; identical to SEQ ID NO: 1635

SEQ ID NO: 5998 - DNA, 51 bp, Homo sapiens; identical to SEQ ID NO: 1635

SEQ ID NO: 5999 - DNA, 51 bp, Homo sapiens; identical to SEQ ID NO: 5968

SEQ ID NO: 6000 - DNA, 51 bp, Homo sapiens; identical to SEQ ID NO: 5866

SEQ ID NO: 6001 - DNA, 51 bp, Homo sapiens
atgagctggatccgccaggctccagggagggggctggagtgggtttcattc

SEQ ID NO: 6002 - DNA, 51 bp, Homo sapiens; identical to SEQ ID NO: 5954

SEQ ID NO: 6003 - DNA, 51 bp, Homo sapiens; identical to SEQ ID NO: 1634

SEQ ID NO: 6004 - DNA, 51 bp, Homo sapiens
atgaactgggtccgccaggctccagggaaggggctggagtgggtttcatac

SEQ ID NO: 6005 - DNA, 51 bp, Homo sapiens; identical to SEQ ID NO: 1635

SEQ ID NO: 6006 - DNA, 51 bp, Homo sapiens
atgcactgggtgcgacaggcccctggacaagggcttgagtggatgggaata

SEQ ID NO: 6007 - DNA, 51 bp, Homo sapiens; identical to SEQ ID NO: 5954

SEQ ID NO: 6008 - DNA, 51 bp, Homo sapiens
tggagttggatccgccagcccccagggaagggcctggagtggtttgggttc

SEQ ID NO: 6009 - DNA, 51 bp, Homo sapiens
tggacctggatccggcagcccccagggaagggactggagtggattgggtat

SEQ ID NO: 6010 - DNA, 51 bp, Homo sapiens; identical to SEQ ID NO: 5968

SEQ ID NO: 6011 - DNA, 51 bp, Homo sapiens
  modified_base (4)..(5): a, c, t, g, unknown or other
atcnnctgggtgcgccagatgcccgggaaaggcctggagtggatggggagg

SEQ ID NO: 6012 - DNA, 51 bp, Homo sapiens
tggagctggattcggcagtccccagagacgggactggagtggattgggtat

SEQ ID NO: 6013 - DNA, 51 bp, Homo sapiens; identical to SEQ ID NO: 5953

SEQ ID NO: 6014 - DNA, 51 bp, Homo sapiens; identical to SEQ ID NO: 5968

SEQ ID NO: 6015 - DNA, 51 bp, Homo sapiens; identical to SEQ ID NO: 5980

SEQ ID NO: 6016 - DNA, 51 bp, Homo sapiens; identical to SEQ ID NO: 1635

SEQ ID NO: 6017 - DNA, 51 bp, Homo sapiens; identical to SEQ ID NO: 5954

SEQ ID NO: 6018 - DNA, 51 bp, Homo sapiens
  modified_base (5)..(5): a, c, t, g, unknown or other
tgganctggatccgccagcacccagggaagggcctggagtggattgggtac

SEQ ID NO: 6019 - DNA, 51 bp, Homo sapiens; identical to SEQ ID NO: 5954

SEQ ID NO: 6020 - DNA, 51 bp, Homo sapiens; identical to SEQ ID NO: 5954

SEQ ID NO: 6021 - DNA, 51 bp, Homo sapiens; identical to SEQ ID NO: 1634

SEQ ID NO: 6022 - DNA, 51 bp, Homo sapiens; identical to SEQ ID NO: 5830

SEQ ID NO: 6023 - DNA, 51 bp, Homo sapiens; identical to SEQ ID NO: 1635

SEQ ID NO: 6024 - DNA, 51 bp, Homo sapiens; identical to SEQ ID NO: 5968

SEQ ID NO: 6025 - DNA, 51 bp, Homo sapiens; identical to SEQ ID NO: 5953

SEQ ID NO: 6026 - DNA, 24 bp, Homo sapiens
atcatcggtatgtttggtacaaca

SEQ ID NO: 6027 - DNA, 24 bp, Homo sapiens
atcatccccagctttgccacaaca

SEQ ID NO: 6028 - DNA, 21 bp, Homo sapiens
atctattacagtgggaatatc

SEQ ID NO: 6029 - DNA, 24 bp, Homo sapiens
attagttggaatagcaattttcta

SEQ ID NO: 6030 - DNA, 24 bp, Homo sapiens
atatcgtttgatggaggtcggaca

SEQ ID NO: 6031 - DNA, 24 bp, Homo sapiens
atatggtttgatggaagtaataaa

SEQ ID NO: 6032 - DNA, 21 bp, Homo sapiens
atcaatcaaagtggaagcacc

SEQ ID NO: 6033 - DNA, 30 bp, Homo sapiens
attcgaagcaaatacaacgatctcgcgaca

SEQ ID NO: 6034 - DNA, 24 bp, Homo sapiens
atgtcattttatggaaccacgaca

SEQ ID NO: 6035 - DNA, 24 bp, Homo sapiens
gtttcagctgatggaacttataca

SEQ ID NO: 6036 - DNA, 21 bp, Homo sapiens
atctattacagtgggaatatc

SEQ ID NO: 6037 - DNA, 24 bp, Homo sapiens
atccatcctggtaactccgaatcc

SEQ ID NO: 6038 - DNA, 24 bp, Homo sapiens
atgaaccaagatggaagtgataat

SEQ ID NO: 6039 - DNA, 24 bp, Homo sapiens
atgtgggccggtggaagaaatagg

SEQ ID NO: 6040 - DNA, 24 bp, Homo sapiens
atgaacccgaacaatggtgacaca

SEQ ID NO: 6041 - DNA, 24 bp, Homo sapiens
atctatcctgatgactcagatacc

SEQ ID NO: 6042 - DNA, 21 bp, Homo sapiens
atctatcagagtggaagtacc

SEQ ID NO: 6043 - DNA, 24 bp, Homo sapiens
ataaaccaagatggaagtgacaca

SEQ ID NO: 6044 - DNA, 21 bp, Homo sapiens
atcaatcatagtggaagcacc

SEQ ID NO: 6045 - DNA, 24 bp, Homo sapiens
ataaagcaagatggaagtgagaaa

SEQ ID NO: 6046 - DNA, 24 bp, Homo sapiens
ataaatcaagatggaagtgacaca

SEQ ID NO: 6047 - DNA, 24 bp, Homo sapiens
gtgagtactagtggtgatagaaca

SEQ ID NO: 6048 - DNA, 24 bp, Homo sapiens
attagtggtagtggtaatgccaaa

SEQ ID NO: 6049 - DNA, 21 bp, Homo sapiens
ctctattacagtgggaccacc

SEQ ID NO: 6050 - DNA, 24 bp, Homo sapiens
ataaagcgagatggaagtgcaaag

SEQ ID NO: 6051 - DNA, 24 bp, Homo sapiens
atcgaccctagtggtgacagcaga

SEQ ID NO: 6052 - DNA, 24 bp, Homo sapiens
atcaacacctacactgggaaccca

SEQ ID NO: 6053 - DNA, 24 bp, Homo sapiens
gtaacagatgatgaatcttataaa

SEQ ID NO: 6054 - DNA, 24 bp, Homo sapiens
attagtggtggtggtcatagcaca

SEQ ID NO: 6055 - DNA, 21 bp, Homo sapiens
atccattacagtgggagcacc

SEQ ID NO: 6056 - DNA, 24 bp, Homo sapiens
ataaagcaagatggaagtgagaag

SEQ ID NO: 6057 - DNA, 21 bp, Homo sapiens
atccattacagtgggagcacg

SEQ ID NO: 6058 - DNA, 21 bp, Homo sapiens
attagtcagagtagagtcacc

SEQ ID NO: 6059 - DNA, 24 bp, Homo sapiens
ctcgttcctgtttatggtacaccg

SEQ ID NO: 6060 - DNA, 24 bp, Homo sapiens
ataaaccaagatggacgagagaag

SEQ ID NO: 6061 - DNA, 24 bp, Homo sapiens
ctcgttcctatttatgggacacca

SEQ ID NO: 6062 - DNA, 24 bp, Homo sapiens
atatggtttgatggaggtactaaa

SEQ ID NO: 6063 - DNA, 21 bp, Homo sapiens
atctattacagtggcaacacc

SEQ ID NO: 6064 - DNA, 24 bp, Homo sapiens
atatcacatgatggaagtaatgaa

SEQ ID NO: 6065 - DNA, 24 bp, Homo sapiens
atcaaccctaacagtggtggcaca

SEQ ID NO: 6066 - DNA, 24 bp, Homo sapiens
attagttggaatagtgataccata

SEQ ID NO: 6067 - DNA, 24 bp, Homo sapiens
atcactggggatggttctgacacg

SEQ ID NO: 6068 - DNA, 24 bp, Homo sapiens
attagtagccgtggtgatacgata

SEQ ID NO: 6069 - DNA, 24 bp, Homo sapiens
attagtggcagtgctactatcata

SEQ ID NO: 6070 - DNA, 24 bp, Homo sapiens
attagttggaatagtggtagcaga

SEQ ID NO: 6071 - DNA, 24 bp, Homo sapiens
atatcatctgatggaagtaataaa

SEQ ID NO: 6072 - DNA, 24 bp, Homo sapiens
atctatcctggtgactctcatacc

SEQ ID NO: 6073 - DNA, 24 bp, Homo sapiens
atatcatctgatggaagtaataaa

SEQ ID NO: 6074 - DNA, 21 bp, Homo sapiens
atcgattacactgggaacacc

SEQ ID NO: 6075 - DNA, 12 bp, Homo sapiens
ggtagtaccata

SEQ ID NO: 6076 - DNA, 24 bp, Homo sapiens
gttaattggaatagtggtgacatc

SEQ ID NO: 6077 - DNA, 24 bp, Homo sapiens
atcaattggaaaagtaataaccta

SEQ ID NO: 6078 - DNA, 24 bp, Homo sapiens
attaagagtgatgggagggacata

SEQ ID NO: 6079 - DNA, 24 bp, Homo sapiens
attaattggaacagtggtgacata

SEQ ID NO: 6080 - DNA, 24 bp, Homo sapiens
atcaccgctatgtttggcacagcg

SEQ ID NO: 6081 - DNA, 24 bp, Homo sapiens
atagcctatgatggaagtaataag

SEQ ID NO: 6082 - DNA, 21 bp, Homo sapiens
atctatttcactgggaagacc

SEQ ID NO: 6083 - DNA, 24 bp, Homo sapiens
attagttggaatagcgataccata

SEQ ID NO: 6084 - DNA, 24 bp, Homo sapiens
attagtgctagcggtggtcgcaca

SEQ ID NO: 6085 - DNA, 21 bp, Homo sapiens
atctatcccagtgggagcacc

SEQ ID NO: 6086 - DNA, 24 bp, Homo sapiens
atacggtatgatggaagtaagaaa

SEQ ID NO: 6087 - DNA, 24 bp, Homo sapiens
attagtagcagttctactaccaaa

SEQ ID NO: 6088 - DNA, 24 bp, Homo sapiens
cgtaatcctcgtggtggtagtaca

SEQ ID NO: 6089 - DNA, 21 bp, Homo sapiens
attttcattactgggagcacc

SEQ ID NO: 6090 - DNA, 24 bp, Homo sapiens
attagtggtagtggtaatatcata

SEQ ID NO: 6091 - DNA, 24 bp, Homo sapiens
gtacggtatgatggaagtaatata

SEQ ID NO: 6092 - DNA, 21 bp, Homo sapiens
atcactggtaacggtaggaca

SEQ ID NO: 6093 - DNA, 24 bp, Homo sapiens
attgttgggagtggtgatagcaca

SEQ ID NO: 6094 - DNA, 24 bp, Homo sapiens
atagacgaagatggaagagacaaa

SEQ ID NO: 6095 - DNA, 30 bp, Homo sapiens
attagaagcaaagcttatggtgggacaaca

SEQ ID NO: 6096 - DNA, 21 bp, Homo sapiens
atctatcatagtgggagcacc

SEQ ID NO: 6097 - DNA, 24 bp, Homo sapiens
atcagcactaagaatgttaacaca

SEQ ID NO: 6098 - DNA, 24 bp, Homo sapiens
atcaaccctcagagcggtggcaca

SEQ ID NO: 6099 - DNA, 21 bp, Homo sapiens
atctatcacactgggagcacc

SEQ ID NO: 6100 - DNA, 21 bp, Homo sapiens
atctggcatagtgggaggacc

SEQ ID NO: 6101 - DNA, 21 bp, Homo sapiens
attaattctggcgggagaacg

SEQ ID NO: 6102 - DNA, 21 bp, Homo sapiens
atttatagtggtggtggcaca

SEQ ID NO: 6103 - DNA, 24 bp, Homo sapiens
atacaccctggtggaaatgagaga

SEQ ID NO: 6104 - DNA, 21 bp, Homo sapiens
atctatcatagtgtgaacacc

SEQ ID NO: 6105 - DNA, 30 bp, Homo sapiens
gtgaagagccagagtgatggtggggcagca

SEQ ID NO: 6106 - DNA, 24 bp, Homo sapiens
atcagccctatctttggagcagta

SEQ ID NO: 6107 - DNA, 24 bp, Homo sapiens
atcagcccaatttttggaggagtt

SEQ ID NO: 6108 - DNA, 24 bp, Homo sapiens
attagtggaagtggtgatgacacc

SEQ ID NO: 6109 - DNA, 24 bp, Homo sapiens
attagtagtagaagtgatgccatc

SEQ ID NO: 6110 - DNA, 24 bp, Homo sapiens
atgaacagcggtggaagtgtcatc

SEQ ID NO: 6111 - DNA, 30 bp, Homo sapiens
attaaaagaaaaattgagggtgaggcaaca

SEQ ID NO: 6112 - DNA, 24 bp, Homo sapiens
agcatccctctccttggaacaaca

SEQ ID NO: 6113 - DNA, 24 bp, Homo sapiens
attactagtagtagtaatgacata

SEQ ID NO: 6114 - DNA, 24 bp, Homo sapiens
atcgaccctagtggtggtggcacc

SEQ ID NO: 6115 - DNA, 24 bp, Homo sapiens
atagagcccgatggaagtcagaga

SEQ ID NO: 6116 - DNA, 24 bp, Homo sapiens
atttttgctagtggttctacctta

SEQ ID NO: 6117 - DNA, 21 bp, Homo sapiens
atctctgacagcgggaggacc

SEQ ID NO: 6118 - DNA, 24 bp, Homo sapiens
atcagcagttacaatgggaacaag

SEQ ID NO: 6119 - DNA, 24 bp, Homo sapiens
atcaccgctatctttgggacaaca

SEQ ID NO: 6120 - DNA, 24 bp, Homo sapiens
atcagccccatctttggagcagtg

SEQ ID NO: 6121 - DNA, 24 bp, Homo sapiens
ataaagcacgatggaagcgagaag

SEQ ID NO: 6122 - DNA, 24 bp, Homo sapiens
ataagtagtagtggttataccatc

SEQ ID NO: 6123 - DNA, 24 bp, Homo sapiens
attagtggtagtggtacttacata

SEQ ID NO: 6124 - DNA, 24 bp, Homo sapiens
atcagccctatatttggagcagga

SEQ ID NO: 6125 - DNA, 24 bp, Homo sapiens
atcagtcctatttttggagcagta

SEQ ID NO: 6126 - DNA, 24 bp, Homo sapiens
attagcggtagcggtgggagtaca

SEQ ID NO: 6127 - DNA, 24 bp, Homo sapiens
attagtggtattggtgatactaca

SEQ ID NO: 6128 - DNA, 24 bp, Homo sapiens
atcaaccaagatggaagtgagaaa

SEQ ID NO: 6129 - DNA, 30 bp, Homo sapiens
atttggagcaaatctgatggtctgacaaca

SEQ ID NO: 6130 - DNA, 24 bp, Homo sapiens
ataaagcaagatgggagtgagaca

SEQ ID NO: 6131 - DNA, 21 bp, Homo sapiens
gtctactatgctgggggcacc

SEQ ID NO: 6132 - DNA, 24 bp, Homo sapiens
atcatccctatctttggtacaaca

SEQ ID NO: 6133 - DNA, 24 bp, Homo sapiens
atctatcctggcgactcgtctact

SEQ ID NO: 6134 - DNA, 24 bp, Homo sapiens
atcaaccctaacagtggtggcgca

SEQ ID NO: 6135 - DNA, 27 bp, Homo sapiens
  modified_base (2)..(2): a, c, t, g, unknown or other
  modified_base (8)..(9): a, c, t, g, unknown or other
  modified_base (16)..(16): a, c, t, g, unknown or other
  modified_base (18)..(18): a, c, t, g, unknown or other
  modified_base (21)..(21): a, c, t, g, unknown or other
anatactnnttggccnantgntatact

SEQ ID NO: 6136 - DNA, 21 bp, Homo sapiens
gtctatagccacggaagaacc

SEQ ID NO: 6137 - DNA, 21 bp, Homo sapiens
atcaattatggtgggaccgcc

SEQ ID NO: 6138 - DNA, 24 bp, Homo sapiens
ataaaccaagatggaagtgagaaa

SEQ ID NO: 6139 - DNA, 27 bp, Homo sapiens
  modified_base (21)..(21): a, c, t, g, unknown or other
acatattacaggtccaagtgntataat

SEQ ID NO: 6140 - DNA, 24 bp, Homo sapiens
attagtgctactggtgctaccatt

SEQ ID NO: 6141 - DNA, 24 bp, Homo sapiens
attagtcgtgatggtattctcaca

SEQ ID NO: 6142 - DNA, 24 bp, Homo sapiens
atcgtccctatccttggaacgaca

SEQ ID NO: 6143 - DNA, 21 bp, Homo sapiens
ttctattacagggggaccccc

SEQ ID NO: 6144 - DNA, 24 bp, Homo sapiens
gtcctccctatgtttaatgtacca

SEQ ID NO: 6145 - DNA, 24 bp, Homo sapiens
atcatccctatccttgataaaacg

SEQ ID NO: 6146 - DNA, 24 bp, Homo sapiens
atatcatatgatggaggtaatgaa

SEQ ID NO: 6147 - DNA, 30 bp, Homo sapiens
attaaaagtgaccgtgatggtgggacagca

SEQ ID NO: 6148 - DNA, 24 bp, Homo sapiens
attagtacaagtggaagtattata

SEQ ID NO: 6149 - DNA, 24 bp, Homo sapiens
ataaaccaagatgggagtgagaaa

SEQ ID NO: 6150 - DNA, 24 bp, Homo sapiens
cttagtggagatagtggtaccata

SEQ ID NO: 6151 - DNA, 24 bp, Homo sapiens
atcctcccagccagtggcgacaca

SEQ ID NO: 6152 - DNA, 21 bp, Homo sapiens
  modified_base (5)..(5): a, c, t, g, unknown or other
  modified_base (10)..(10): a, c, t, g, unknown or other
  modified_base (12)..(12): a, c, t, g, unknown or other
  modified_base (15)..(15): a, c, t, g, unknown or other
gtgtnttatncnggnatcgcc

SEQ ID NO: 6153 - DNA, 30 bp, Homo sapiens
attaaaaggcaaagtagtggtgggaccaca

SEQ ID NO: 6154 - DNA, 21 bp, Homo sapiens
atgtcctatagtgggaccccc

SEQ ID NO: 6155 - DNA, 21 bp, Homo sapiens
atctattatagtgggagcacc

SEQ ID NO: 6156 - DNA, 24 bp, Homo sapiens
atcaaccctaacagtggtggcacc

SEQ ID NO: 6157 - DNA, 21 bp, Homo sapiens
atctattatagtgggagcacc

SEQ ID NO: 6158 - DNA, 24 bp, Homo sapiens
attagtgggcctggtcggggcaca

SEQ ID NO: 6159 - DNA, 21 bp, Homo sapiens
atctattatagtgggagcacc

SEQ ID NO: 6160 - DNA, 24 bp, Homo sapiens
atatcatatgatggaagtaataaa

SEQ ID NO: 6161 - DNA, 21 bp, Homo sapiens
atctatgacagtgggagcacc

SEQ ID NO: 6162 - DNA, 30 bp, Homo sapiens
attagagccaaaccttatggtgggacgaca

SEQ ID NO: 6163 - DNA, 21 bp, Homo sapiens
atctattacagtgggagcacc

SEQ ID NO: 6164 - DNA, 24 bp, Homo sapiens
attagtggggatggtggtagcaca

SEQ ID NO: 6165 - DNA, 24 bp, Homo sapiens
atcaaccctaacactggtggcaca

SEQ ID NO: 6166 - DNA, 21 bp, Homo sapiens
atctattatagtgggaacacc

SEQ ID NO: 6167 - DNA, 21 bp, Homo sapiens
atgtattatagtgggaacacc

SEQ ID NO: 6168 - DNA, 24 bp, Homo sapiens
atatggtatgatggaagtaataaa

SEQ ID NO: 6169 - DNA, 24 bp, Homo sapiens
acatcatttgttggaactatgaaa

SEQ ID NO: 6170 - DNA, 24 bp, Homo sapiens
atcagcgcttacaatggtaacaca

SEQ ID NO: 6171 - DNA, 24 bp, Homo sapiens
attagtagtagtggtagtaccata

SEQ ID NO: 6172 - DNA, 21 bp, Homo sapiens
atctattacagtgggagcacc

SEQ ID NO: 6173 - DNA, 24 bp, Homo sapiens
attgatcctagtgactcttatacc

SEQ ID NO: 6174 - DNA, 24 bp, Homo sapiens
atatcatatgatggaagtaataaa

SEQ ID NO: 6175 - DNA, 24 bp, Homo sapiens
attagtggggatggtggtagcaca

SEQ ID NO: 6176 - DNA, 24 bp, Homo sapiens
ataaagcaagatggaagtgagaaa

SEQ ID NO: 6177 - DNA, 21 bp, Homo sapiens
atttatagcggtgatagcaca

SEQ ID NO: 6178 - DNA, 24 bp, Homo sapiens
atcaaccctaacagtggtggcaca

SEQ ID NO: 6179 - DNA, 24 bp, Homo sapiens
attagtggggatggtggtagcaca

SEQ ID NO: 6180 - DNA, 21 bp, Homo sapiens
atctattacagtgggagcacc

SEQ ID NO: 6181 - DNA, 21 bp, Homo sapiens
gagtattacagtgggagcacc

SEQ ID NO: 6182 - DNA, 24 bp, Homo sapiens
atcaaccctaacagtggtggcaca

SEQ ID NO: 6183 - DNA, 21 bp, Homo sapiens
atctattatagtgggaacacc

SEQ ID NO: 6184 - DNA, 21 bp, Homo sapiens
attggtactgctggtgacaca

SEQ ID NO: 6185 - DNA, 24 bp, Homo sapiens
attagttggaatagtggtagcata

SEQ ID NO: 6186 - DNA, 24 bp, Homo sapiens
atatcatatgatggaagtaataaa

SEQ ID NO: 6187 - DNA, 30 bp, Homo sapiens
tttaaaatcaaagctgatggtgggacaaca

SEQ ID NO: 6188 - DNA, 21 bp, Homo sapiens
atctattatagtgggaacacc

SEQ ID NO: 6189 - DNA, 24 bp, Homo sapiens
attagtagtaatgggggtagcaca

SEQ ID NO: 6190 - DNA, 21 bp, Homo sapiens
atctattatagtgggagcacc

SEQ ID NO: 6191 - DNA, 21 bp, Homo sapiens
atctattatagtgggcgcacc

SEQ ID NO: 6192 - DNA, 24 bp, Homo sapiens
atctatcctagtgactctgacacc

SEQ ID NO: 6193 - DNA, 21 bp, Homo sapiens
atctattatagtgggaacacc

SEQ ID NO: 6194 - DNA, 21 bp, Homo sapiens
atctattatagtgggagcacc

SEQ ID NO: 6195 - DNA, 21 bp, Homo sapiens
atccattacagtgggagcacc

SEQ ID NO: 6196 - DNA, 24 bp, Homo sapiens
  modified_base (7)..(7): a, c, t, g, unknown or other
atatggnatgatggaagtaataaa

SEQ ID NO: 6197 - DNA, 24 bp, Homo sapiens
attagtagtagtggtagtaccata

SEQ ID NO: 6198 - DNA, 21 bp, Homo sapiens
atctattacactgggagcacc

SEQ ID NO: 6199 - DNA, 24 bp, Homo sapiens
attagtagtagtagtagttacaca

SEQ ID NO: 6200 - DNA, 24 bp, Homo sapiens
attagtagtagtagtagttacata

SEQ ID NO: 6201 - DNA, 24 bp, Homo sapiens
attagtagtagtagtagttacata

SEQ ID NO: 6202 - DNA, 24 bp, Homo sapiens
attagtagtagtagtagttacaca

SEQ ID NO: 6203 - DNA, 24 bp, Homo sapiens
attagtggggatggtggtagcaca

SEQ ID NO: 6204 - DNA, 24 bp, Homo sapiens
attagtagtattggtcgtaccgta

SEQ ID NO: 6205 - DNA, 21 bp, Homo sapiens
atctattatagtgggaacacc

SEQ ID NO: 6206 - DNA, 24 bp, Homo sapiens
atatggtatgatggaagtaataaa

SEQ ID NO: 6207 - DNA, 24 bp, Homo sapiens
attagtggtagtggtggtaccata

SEQ ID NO: 6208 - DNA, 24 bp, Homo sapiens
attagtagtagtggtagttacata

SEQ ID NO: 6209 - DNA, 24 bp, Homo sapiens
atcaaccctagtggtggtagcaca

SEQ ID NO: 6210 - DNA, 21 bp, Homo sapiens
atctattatagtgggaacacc

SEQ ID NO: 6211 - DNA, 21 bp, Homo sapiens
atctattacagtgggagcacc

SEQ ID NO: 6212 - DNA, 21 bp, Homo sapiens
ttctatgacagtgggagcctt

SEQ ID NO: 6213 - DNA, 24 bp, Homo sapiens
attagtagtagtagtagttacaca

SEQ ID NO: 6214 - DNA, 24 bp, Homo sapiens
attgatcctactgactcttatacc

SEQ ID NO: 6215 - DNA, 21 bp, Homo sapiens
atcttgtatactgggagcacc

SEQ ID NO: 6216 - DNA, 24 bp, Homo sapiens
atcaaccctaacagtggtggcaca

SEQ ID NO: 6217 - DNA, 24 bp, Homo sapiens
attagtagtagtagtagttacaca

SEQ ID NO: 6218 - DNA, 21 bp, Homo sapiens
atctattatagtgggagcacc

SEQ ID NO: 6219 - DNA, 24 bp, Homo sapiens
attagtagtagtagtagttacata

SEQ ID NO: 6220 - DNA, 21 bp, Homo sapiens
atctattatagtgggagcacc

SEQ ID NO: 6221 - DNA, 21 bp, Homo sapiens
atctattacagtgggagcacc

SEQ ID NO: 6222 - DNA, 21 bp, Homo sapiens
atctattatagtgggagcacc

SEQ ID NO: 6223 - DNA, 21 bp, Homo sapiens
atctattatagtgggaacacc

SEQ ID NO: 6224 - DNA, 24 bp, Homo sapiens
atatcatatgatggaagtaataaa

SEQ ID NO: 6225 - DNA, 24 bp, Homo sapiens
atttgctttgatggaaagaataaa

SEQ ID NO: 6226 - DNA, 24 bp, Homo sapiens
attagtagtagtagtagttacata

SEQ ID NO: 6227 - DNA, 24 bp, Homo sapiens
attagtagtagtagtagttacaca

SEQ ID NO: 6228 - DNA, 24 bp, Homo sapiens
atcaaccctaacagtggtggcaca

SEQ ID NO: 6229 - DNA, 114 bp, Homo sapiens
aactacgcacagaagttccagggcagagtcacgattaccgcggacgaaatctcgagcacagcctacatggagctgagcagcctgagatctgaggacacggccgtctattattgt

SEQ ID NO: 6230 - DNA, 114 bp, Homo sapiens
aaatatgcacaaaagtttcgggagagagtcataattaccgcggacgaatctacgaccactgcctacatggagctgggcggcctgacatctgacgacacggccgtgtatcactgc

SEQ ID NO: 6231 - DNA, 114 bp, Homo sapiens
tactacaacccctccctcaagagtcgtgtcaccttatcaatagacacgtccaagagccaggtctccctgaggctgagctctgtgaccgctgcggacacggccatgtattactgt

SEQ ID NO: 6232 - DNA, 114 bp, Homo sapiens
  modified_base (28)..(28): a, c, t, g, unknown or other
gattacgcggactctgtgaagggccggntcaccatctccagagacgacgccaagaactccctgtatctggaaatgaacagcctgagacttgaggacacggccttctattactgt

SEQ ID NO: 6233 - DNA, 114 bp, Homo sapiens
ttctccgcagactccgtgaagggccgattcaccatctccagagacaattccaagaacacggtgtttctgcacatgaacagtctgagacctgcggacacggctgtgtatttctgt

SEQ ID NO: 6234 - DNA, 114 bp, Homo sapiens
tactatacagattccgtgaagggccgattcatcatctccagagaccattccaagaacacattgtatctgcaaatgaacagcctgagagccgaggacacggctgtgtatcactgt

SEQ ID NO: 6235 - DNA, 114 bp, Homo sapiens
  modified_base (13)..(13): a, c, t, g, unknown or other
acctataacccgnccctcaagagtcgcgtcaccttatcagtggacacgtccaagaaccagttctccctgaggttgacctctgtgaccgccgcggacacggctgtgtactactgt

SEQ ID NO: 6236 - DNA, 114 bp, Homo sapiens
gcatacactgagtcggtgaaaggcaggttcaccatctccagagatgattcaaagaacacggcgtatctgcaaatgaacagcctgagaattgaggactcggccgtatattactgt

SEQ ID NO: 6237 - DNA, 114 bp, Homo sapiens
tacgaagcggactccgtgaagggccgattcaccatctccagagacaattccaagaacacgctgtatttacaaatgaacagcctgcgaccagaagacacggctgtgtatttctgt

SEQ ID NO: 6238 - DNA, 114 bp, Homo sapiens
aactatggagactccatgaagggccgagtcaccgtctccagagacaatctcaagaaaacgatgtatcttcagatcaatagcctcagacctgaggacacggctatgtactattgt

SEQ ID NO: 6239 - DNA, 114 bp, Homo sapiens
aactacaacccctccctcaagagtcgtgtcaccttatcagtagacacgtccaagagccagttctccctgaagctgaactctgtgaccgctgcggacacggccatgtattactgt

SEQ ID NO: 6240 - DNA, 114 bp, Homo sapiens
agatacagcccgtccttccaaggccaggtcaccatgtcagccgacaagtccattaataccgcctacctggagtggagcagcctgaaggcctcggacaccgccatgtattactgt

SEQ ID NO: 6241 - DNA, 114 bp, Homo sapiens
tattatgtggactctgtgaagggccgattcaccatctccagagacaacgccaagaactcactgtatctgcagatgaacagcctgagagccgaggacacggctgtctattattgt

SEQ ID NO: 6242 - DNA, 114 bp, Homo sapiens
ttctatgcagactccgtgaagggccgattcaccatctccagagacgattccaaaaacaccctgtctctgcaaatgcacagcctgagagccgaggacacgggggtctattactgt

SEQ ID NO: 6243 - DNA, 114 bp, Homo sapiens
ggctatgcagagaaattccggggcagagtctccatgaccagggacacctccagaaacacagccttcatggagctgcgcggcctgacatctgaggacacggccatatattactgt

SEQ ID NO: 6244 - DNA, 114 bp, Homo sapiens
aaatacagcccgaccttccaaggccaggtcaccatctcagccgacaagtccatcagcaccgcctacctgcagtggagcagcctgaaggcctcggacaccgccatgtattactgt

SEQ ID NO: 6245 - DNA, 114 bp, Homo sapiens
tactacagcccgtcgctcaagagtcgagtcaacatctcgttggacaagtctaataatcgcttcttcctgaatgtgatgtctgtgaccgccgcggacacggccgtctattactgt

SEQ ID NO: 6246 - DNA, 114 bp, Homo sapiens
acgtttctgggccctgtgaagggccgattcaccatctccagagacaacaccaagaactcagtgtttctgcaaatgaacgtcctgagagacgaggactcggctatctactactgt

SEQ ID NO: 6247 - DNA, 114 bp, Homo sapiens
aactacaacccgtccctcaagagtcgagtcaccatatcagtagacacgtccaagaaccagttctccctgaagctgagctctgtgaccgccgcggacacggctgtgtattactgt

SEQ ID NO: 6248 - DNA, 114 bp, Homo sapiens
tactatgtggactctgtgaagggccgattcaccatgtccagggacaacgccaacaactcattgtatctgcaaatgagcaacctgagagccgaagacacggctatatattactgt

SEQ ID NO: 6249 - DNA, 114 bp, Homo sapiens
acctttttgggctctgtggagggccgattcaccatctccagagacaacgccaggaactcagtgtttctgcaaatgagcgtcctgagagtcgaggacacggctacctactactgt

SEQ ID NO: 6250 - DNA, 114 bp, Homo sapiens
gtctacgcagactccgtgaagggccggttcaccatctccagagacaattccaagaacacgctgtatctgcaaatgaacagcctgagagtcgaggacacggccctttattactgc

SEQ ID NO: 6251 - DNA, 114 bp, Homo sapiens
taccacgcagactctgtgaggggccgcttcaccatctcccgggacaacgccaaggactcattgtttctgcaaatgaacaacctgagagtcgacgacacggccgtctattattgt

SEQ ID NO: 6252 - DNA, 114 bp, Homo sapiens
agctacaacccctccctcaagagtcgagtcaccatgtcagcagacacgtccaagaggcagttgtccctgaggttgacctctgtgacctctgcggacacggccgtgtattactgt

SEQ ID NO: 6253 - DNA, 114 bp, Homo sapiens
tactacgtggactctgcgaagggccgattcaccatctcccgagacaacaccaagaactccgtggatctgcacatgagaagcctgacagtcgaggacacggccctgtattactgt

SEQ ID NO: 6254 - DNA, 114 bp, Homo sapiens
agttactcacagaaatttcagggcagagtcaccttgaccagtgacacgtccacgagcacagtctacatggaactgaggaccctgagatctgacgacacggccgtgttttactgc

SEQ ID NO: 6255 - DNA, 114 bp, Homo sapiens
acctatgcccaggccttcacaggacggtttgtcttctccttggacacctctgtcagtacggcgtttctgcagatcaccagcctcaaggctgacgacactgccatatattactgt

SEQ ID NO: 6256 - DNA, 114 bp, Homo sapiens
tcgtatgcaaactccgtgaagggccgatacaccatctccagagacaattccaggaacacggtgtatctgcacatggacagcctgagacctgaggacacggctatttattactgt

SEQ ID NO: 6257 - DNA, 114 bp, Homo sapiens
tactacgcagactccgtgaagggccggttcagcatctccagagacaattccaagaacacgctgtatctgcaactgaacagcctgagagccgaagacacggccatattttactgt

SEQ ID NO: 6258 - DNA, 114 bp, Homo sapiens
tcctacagcccgtccctcaagagccgaattaccatgtcagtagacacgtccaagagtcagttctccctgaagttgaactcagtgactgccgcagacacggccgtgtattattgt

SEQ ID NO: 6259 - DNA, 114 bp, Homo sapiens
tactatgtggactctgtgaagggccgattcaccatctccagagacaacgccaagaattcactgtatctgcaaatgaacagcctgagagtcgaggacacggctgtattttactgt

SEQ ID NO: 6260 - DNA, 114 bp, Homo sapiens
ttctacaacccctccctcaagagtcgcgtcaccatatcactgaacgcggccaagaatcacttctccctgaggctgagctctgtgaccgctgcggacacggccgtttattactgt

SEQ ID NO: 6261 - DNA, 114 bp, Homo sapiens
acctacaacccgtccctcgggggtcgagtgtacttctcagtagacacgtccaagaaccagttctccctgaacctgaattctgtgaccgccgcggacacggctgtgtactactgt

SEQ ID NO: 6262 - DNA, 114 bp, Homo sapiens
aactatgcacaggccttccaggacagaatcaccattagcgcggacgagtccacgaacacggcctatttggaactgagcagcctcacatctgaagacacggccgtatattactgt

SEQ ID NO: 6263 - DNA, 114 bp, Homo sapiens
cactatgtggactctgtgaggggccgattcaccatctccagagacaacgccaagaactcactgtatctgcaaatgaacagcctgagagtcgaggacacggctctgtattactgt

SEQ ID NO: 6264 - DNA, 114 bp, Homo sapiens
aactatgcacaggccttccacgacagaatcaccattaccgcggacgagtccacgagcacggcctatttggaaatgaccagcctcacatctgaagacacggccgtatattactgt

SEQ ID NO: 6265 - DNA, 114 bp, Homo sapiens
tactacgcagactccgtgaagggccgattcaccatctccagagacaactccaagaacacgctgtatctgcaaatgaacagcctgagagccgaggacacggctgtctattactgt

SEQ ID NO: 6266 - DNA, 114 bp, Homo sapiens
tactacaatccgtccctcaggagtcgggccagcatttcagtagacacgtccaagaacgagttcttcctgagtctgacttctgtgactgccgcagacacggccgtgtattactgt

SEQ ID NO: 6267 - DNA, 114 bp, Homo sapiens
gactatgcagactccgtcaagggccgattcaccatctcccgagacaattccaagaacaacctatatctgcaaatgaacaggctgagagctgaggacacggctgtatattactgt

SEQ ID NO: 6268 - DNA, 114 bp, Homo sapiens
aactatgcacagaggtttcagggcagggtcaccatgaccagggacacgtccttcagcacagtctacatggaggtgaacaggctgagatctgacgacacggccgtttactactgt

SEQ ID NO: 6269 - DNA, 114 bp, Homo sapiens
tactatgcggactctgtgaagggccggttcaccatctccagagacaacaccaagaactccctgtatctgcaaatgaccagtctgacaagtgaggacacggccctgtatttctgt

SEQ ID NO: 6270 - DNA, 114 bp, Homo sapiens
ttctactcagactctgtgaagggccgattcaccatctccagagacaacaacaaaaactccctctatctgcaaatgtacagtctgtcatctgaggacaccgccctgtatttctgt

SEQ ID NO: 6271 - DNA, 114 bp, Homo sapiens
  modified_base (3)..(3): a, c, t, g, unknown or other
  modified_base (7)..(7): a, c, t, g, unknown or other
  modified_base (34)..(34): a, c, t, g, unknown or other
  modified_base (39)..(41): a, c, t, g, unknown or other
  modified_base (49)..(49): a, c, t, g, unknown or other
  modified_base (54)..(54): a, c, t, g, unknown or other
  modified_base (57)..(57): a, c, t, g, unknown or other
  modified_base (61)..(61): a, c, t, g, unknown or other
  modified_base (80)..(80): a, c, t, g, unknown or other
  modified_base (91)..(91): a, c, t, g, unknown or other
  modified_base (97)..(97): a, c, t, g, unknown or other
  modified_base (101)..(101): a, c, t, g, unknown or other
tantacncagactctgtgaagggccgattcaccntctcnnnagacaacncccanaantcantgtatctgcaaatgaacancctgcaagccnaggacncggntgtttattactgt

SEQ ID NO: 6272 - DNA, 114 bp, Homo sapiens
tactacgcagactctgtgaagggccgattcaccatctcccgggacaacccccggaactcactgtatctgcaaatgaacagcctgagagccgaggacacggccgtgtactactgt

SEQ ID NO: 6273 - DNA, 114 bp, Homo sapiens
gtctatgcggactctgtgaagggccgattcaccatctccagagacaacgccaagacctccctgtatctgcaaatgaacagtctgagacctgaggacacggccttgtattactgt

SEQ ID NO: 6274 - DNA, 114 bp, Homo sapiens
tactatgcagactccgtgaagggccgattcgtcatctccagagacaattccgagaacaccctttatctgcaaatggacagcctgagacctgaggacacggctgtatattactgt

SEQ ID NO: 6275 - DNA, 114 bp, Homo sapiens
agatatagcccgtcattccaagggcaagtcaccctctctgccgacacgtccaccaacaccgcctacctgcactggttcagcctgaaggcctcggacaccgccatttactactgt

SEQ ID NO: 6276 - DNA, 114 bp, Homo sapiens
tactatgccgactccgtgaagggccgattcaccatctccagagacaattccaagaacacgctgtatctgcaaatgaacagcctgagatctgaggacacggctgtgtattcctgt

SEQ ID NO: 6277 - DNA, 114 bp, Homo sapiens
tactacaacccgtccctcaagagtcgagtcaccatatccgaagacacgtccaagaatcagttctccctgaagatgacctctgtgaccgccgcagacacggctgtttactactgt

SEQ ID NO: 6278 - DNA, 114 bp, Homo sapiens
tactacgcagactctgtgaagggccgattcaccatctccagagacaacgccaagaaatcagtgtacctggaaatgaacagcctgagagccgaggacacggctgtttattactgt

SEQ ID NO: 6279 - DNA, 114 bp, Homo sapiens
ggctatgcggactctgtgaagggccgattcaccatctccagagacaacgccaagaagtccctgtttctgcaaatgaacagtctgagacctgaggacacggccttctattattgt

SEQ ID NO: 6280 - DNA, 114 bp, Homo sapiens
ggctatgcggactctgtgaagggccgattcaccatctccagagacagcgccaagaagtccctttatctgcaaatgaacagtctgagaagtgaggatacggccacttattactgt

SEQ ID NO: 6281 - DNA, 114 bp, Homo sapiens
agctacgcggactccgtgaagggccgattcaccgtctccagagacaacgccaagaatacggtgtatctgcaaatgaacagtctgagagccgaggacacggctgtctattactgt

SEQ ID NO: 6282 - DNA, 114 bp, Homo sapiens
gggtatgcggactctgtggaggggaggttcaccatctccagagacaacgccaagaactccttgtttctgcaaatgaacagtctgagaactgaggacacggccttgtattattgt

SEQ ID NO: 6283 - DNA, 114 bp, Homo sapiens
ttctacgcacagaggttccaggatagactcaccattaccgcggacaaacccacggacaaattcatgagcacagtttccatggagctgaggagcctgacatctgaggacacggcc

SEQ ID NO: 6284 - DNA, 114 bp, Homo sapiens
tactatgcagactccgtgaggggccggttcaccgtctccagagacaattccaagaacacgctgtatctgcaaatgaacagcctgagaactgaagacacggctgtgtattactgt

SEQ ID NO: 6285 - DNA, 114 bp, Homo sapiens
  modified_base (60)..(60): a, c, t, g, unknown or other
aactacaacccgtccctcaagagtcgagttaccatatcagtggatccgtctaagacgcanttctcgctgaagctgacctctgtgacggccgcggacacggccgtctattactgt

SEQ ID NO: 6286 - DNA, 114 bp, Homo sapiens
cactatgcggactctgtgaagggccggttcaccatctccagagacaacgccaagaattccgtgtatctgcaaatgagcaggctgacaagtgaggacacggccctgtatttctgt

SEQ ID NO: 6287 - DNA, 114 bp, Homo sapiens
tactacgcagactccgtgaagggccgcttcaccatctccagagacaattccagagacaccttctttctgcaaatgaacagcctgagaaacgacgacacggccatttattattgt

SEQ ID NO: 6288 - DNA, 114 bp, Homo sapiens
aactacaacccctccctcaagagtcgagtcaccatatcagtagacacgtccaagaaccacttctccctaaatttgagctctgtgaccgccgcagacacggccgtctattactgt

SEQ ID NO: 6289 - DNA, 114 bp, Homo sapiens
tactatgctgactccgtgaagggccgattcaccatctccagagacaattccaagagctcgctgtatctgcaaatgaacagcctgagaactgacgacacggctgtgtattattgt

SEQ ID NO: 6290 - DNA, 114 bp, Homo sapiens
tcctacgcagactctgtgaagggccgattcaccatctccagggacaacgcccagaactcattgtttctccatatgaacagcctgagggccgacgacgcggctgtatatttctgt

SEQ ID NO: 6291 - DNA, 114 bp, Homo sapiens
agttacgcacagaacttacagggcagagtcaccttgaccagcgacacgtccacgagtacagtctacttggagctgagcagcctgaaatctgaggacacggccgtatatcactgt

SEQ ID NO: 6292 - DNA, 114 bp, Homo sapiens
gactacaacccctccctcaagagtcgagtcaccatatcattagacacgtcgaagaaccagttctccctgaagctgacctctgtgaccgccgcagacacggccgtgtatttctgt

SEQ ID NO: 6293 - DNA, 114 bp, Homo sapiens
tactacgcagactctgtgaagggccgattcaccatctccagagacaatgccaagaactcactatatctacagatgaacagcgtgagagacgacgacacggctctatattactgt

SEQ ID NO: 6294 - DNA, 114 bp, Homo sapiens
tgctatgcagcctccgtgaagggccgattcaccatctccagagacaattccaagaacacggtatatctgcaaatgaacagcctgagagctgacgacacggctgtgtattactgc

SEQ ID NO: 6295 - DNA, 114 bp, Homo sapiens
ttctacgcggactccgtgaagggccacttcaccatctccagagacaattccaaaaacatgctctatctacaaatgaacagcctgagagccgaggacacggccgtgtattattgt

SEQ ID NO: 6296 - DNA, 114 bp, Homo sapiens
tactacgcagactccgtgaagggccggttcagtatctccagagacaattccaacaatacgctgactctgcaaatgcacagcctgagagccgaggacacggccatctattactgt

SEQ ID NO: 6297 - DNA, 114 bp, Homo sapiens
tattatgtggactctgtgaagggccgattcagcatctccagagacaacgccaagaactcattacatttgcaaatgagtaacctgagagccgaggacacggctgtatattactgt

SEQ ID NO: 6298 - DNA, 114 bp, Homo sapiens
gaatacgccgcgtctgtgaaaggcagattcaccatctcaagagatgattccaaaagcatcgcctatctgcaaatgaacagcctgaaaaccgaggacacagccgtgtattattgt

SEQ ID NO: 6299 - DNA, 114 bp, Homo sapiens
tactacaacatgtccctcaagagtcgagtcaccatatcagtagacacgtccaagaaccagttctccctgaagctgacctctgtgaccgccgcagacacggccgtttactactgt

SEQ ID NO: 6300 - DNA, 114 bp, Homo sapiens
aactatgcacagaaactccagggcagagtcaccatgaccgcagacacatccacgagcacagcctatatggacttgaggaccttgagatccgacgacacggccgtctatttctgt

SEQ ID NO: 6301 - DNA, 114 bp, Homo sapiens
gacgttccacagaagtttcagggcacggtcaccctgaccagggacacgtccatcagcacagcctacatggaactgagcagtctaagatctgacgacacggccctttatttttgt

SEQ ID NO: 6302 - DNA, 114 bp, Homo sapiens
aactccaacccctccctcaagagtcgagtcaccatatcagtagacacgtccaagaaccagttctccctgaagctgagctctgtgaccgctgcggacacggccgtgtattactgt

SEQ ID NO: 6303 - DNA, 114 bp, Homo sapiens
aattacaattcgtccctcaagagtcgactcagcatttcagtagacatcttcaagcaccagttctccctgaatttgaactctctgaccgccgcggacacggccgtgtattactgt

SEQ ID NO: 6304 - DNA, 114 bp, Homo sapiens
acttacggtccgtccctcgacggtcgagtcaccatgtccgtagacacgtccaacaaccaattgtccctcaaactgaggtctgtgaccgccgcagacacggctgtatattactgt

SEQ ID NO: 6305 - DNA, 114 bp, Homo sapiens
tactacgcagactctgtgaagggccgattcaccatctccagagacaatgccaagaactcactgtatctgcaaatgaacagcctgagagccgaggacacggctgtgtattactgt

SEQ ID NO: 6306 - DNA, 114 bp, Homo sapiens
tactacggagactccgtgaagggccgattcaccatctccagagacacttcgaggaactcactgtctcttcaaatgaacagcctgagtgtcgaagacacgggcatatattattgt

SEQ ID NO: 6307 - DNA, 114 bp, Homo sapiens
tatcatgtggactctgtgaggggccgattcaccatctccagagacaacgccaagaactcactgtatttgcaaatgaacagcctgagagccgaggacacggctatatattactgt

SEQ ID NO: 6308 - DNA, 114 bp, Homo sapiens
tactacaacccgtccctcaagagtcgagtcaccgtgtcagtagacacgtccaagaaccagttgtccctgaggctgacctctgtgaccgccgcagacacggccatgtattactgt

SEQ ID NO: 6309 - DNA, 114 bp, Homo sapiens
gactatggtgccgccgtgaaaggcagattcaccatctcaagagatgactcaaaaaacacggtctttctgcaaatgaacagcctgaggaccgaagacacaggcgtttattattgt

SEQ ID NO: 6310 - DNA, 114 bp, Homo sapiens
caccacgcacagaagttccagggcagagtcacgattaccgcggacattttcacgagcacagcctacatggagctgagcagcctgggatctgaggacacggccatttattattgt

SEQ ID NO: 6311 - DNA, 114 bp, Homo sapiens
aagcacgcacagaagtttcagggcagggtcacgatcaccgcggacattttcgcgcgcacagtctatatggacctgagcaacctgggatctgatgacacggccatttatttctgt

SEQ ID NO: 6312 - DNA, 114 bp, Homo sapiens
tactacgcagactccgtgaagggccggttcaccatctccagagacaattccaagaacacggtgtatctggaaatgagtagcctgagagccgaggacacggccgtatatttctgt

SEQ ID NO: 6313 - DNA, 114 bp, Homo sapiens
tactacgcgggctccgtgcagggccgcttcaccatctccagaaacaacgccgcgaatacattgtatctgcaaatgaacagcctgagagtcgaggacacggctctttattactgt

SEQ ID NO: 6314 - DNA, 114 bp, Homo sapiens
aggtacgcggactctgtgaagggccgattcaccatctacagggacaacgccaagaagtcagtgcatctggagatgaacagcctgcgacccgacgacacggccgtctattactgt

SEQ ID NO: 6315 - DNA, 114 bp, Homo sapiens
gactacgctgcacccgtgaaaggcagattcaccatttcaagagatgattcaagatataccgtgcatctgcaaatggacagcctgaaaagcgaggacacagccgtttattactgt

SEQ ID NO: 6316 - DNA, 114 bp, Homo sapiens
aaatacgcacacaaattccagggcagagtcacaattaccgccgaggattcagggagcacaacctacttggacctgagccgcctgaattttgacgacacggccgtctactactgt

SEQ ID NO: 6317 - DNA, 114 bp, Homo sapiens
tactacgcagactcagtgaagggccgattcaccatctccagagacaacgccaagaactcactgtttctgcaaatgaacagcctgagaaccgacgacacggctgtgtattactgt

SEQ ID NO: 6318 - DNA, 114 bp, Homo sapiens
acctacgcacagaagttccagggcagagtcaccatgaccagggacacgtccacgagcacagtcaacatgcagctgaccagcctgagatctgaggacacggccgtgtattactgt

SEQ ID NO: 6319 - DNA, 114 bp, Homo sapiens
tggcatgtggactctgtgaagggccgattcaccatctccagagacaacgccaagaactcactgtatctgcaaatgaacagcctgagaggcgaggacacggctatgtattactgt

SEQ ID NO: 6320 - DNA, 114 bp, Homo sapiens
ttctacgcagactctgtgaagggccgattcaccatctccagagacaacgccaagaactcactctatctgcaaatgaacagcctgagaggcgaggacacggctgtctattactgt

SEQ ID NO: 6321 - DNA, 114 bp, Homo sapiens
aattacaatccctccctcaagagtcgagtcaccatatcaatagacacgtccaagaaccagttctccctgaaattgaggtctgtgaccgctgcggacacggccgtctatttctgt

SEQ ID NO: 6322 - DNA, 114 bp, Homo sapiens
cactatgtacagaagttccagggcagagtcaccatgaccacagacacatccacgaacacagcctacatggagttgaggagcctgagatctgacgacacggccgtgtattactgt

SEQ ID NO: 6323 - DNA, 114 bp, Homo sapiens
aactacgcacagaagttccagggcagactcacgattaccgcggacgagtccacgagttcaacctacatggagctgagcagcctgagatctgaggacacggccgtgtattactgt

SEQ ID NO: 6324 - DNA, 114 bp, Homo sapiens
aaacacggacaggagttccagggcagagtcacgtttaccgcggacgttttcacgagcacagtttacatggagctgagcagcctgggatctgaggacacggccatttattattgt

SEQ ID NO: 6325 - DNA, 114 bp, Homo sapiens
tattatgtgggctctgtgcagggccgatttatcatctccaaagacaacgccaagaattttttgtatctgcaaatggaccgcctgagagccgatgacacggctgtctattactgt

SEQ ID NO: 6326 - DNA, 114 bp, Homo sapiens
ttctacgcagactctgtgaagggccgattcaccatctccagggacaactccaagaactcactttatttgcaaatgaacagcctgacagccgaggacacggccgtatattactgt

SEQ ID NO: 6327 - DNA, 114 bp, Homo sapiens
tattacgcagactcagtgaggggccggttcaccatctccagagacaacgccaagacatcgctgtatctgcaaatgaacagcctgagagccgaggacacggctgtgtactactgt

SEQ ID NO: 6328 - DNA, 114 bp, Homo sapiens
aagcacgcacagaagttacagggcagagtcacgattaccgcggacgttttcacgagcacagtctacatggaactgggcagcctgagatctgaggacacggccacgtattattgt

SEQ ID NO: 6329 - DNA, 114 bp, Homo sapiens
aaacacgcacagaagttccagggcagactcaccattaccgcggacgtttttgtgaagacagcctacatggagctgagcagcctaggatttgaggacacggccatttattattgt

SEQ ID NO: 6330 - DNA, 114 bp, Homo sapiens
tggtacgcagactccgtgaagggccggttcaccatctccagagacaattcccagagcacgctgtttctgcaaatgcacggcctgagagccgacgacacggccatatattattgt

SEQ ID NO: 6331 - DNA, 114 bp, Homo sapiens
tactacgctgactccgtgaagggccgcttcaccatctccagagacaactccaagaagtcgctgtatgtgcagttggacagtctgagagccgaggacacggccgtctattattgt

SEQ ID NO: 6332 - DNA, 114 bp, Homo sapiens
gactatgtggactctgtgaagggccgattcaccatctccagagacaacgcccagaactcactgtttctgcaaatggacagcctgagagtcgaggacacggctctgtattattgt

SEQ ID NO: 6333 - DNA, 114 bp, Homo sapiens
caatacgctgcacccgtgcaaggcagattcaccatctcaagagatgattcaaaaaatacactgtatctgcaaatgaacagcctgaaaaccgaggacacagccgtctattactgc

SEQ ID NO: 6334 - DNA, 114 bp, Homo sapiens
tactatgtggactctgtgaagggccgattcacgatctccagagacaacgcccagaactcactgtatctgcagatgaacagcctgagagccgaggacacggctgtgtatttctgt

SEQ ID NO: 6335 - DNA, 114 bp, Homo sapiens
aggtacaacccctccctcaagagtcgagtcaccataactgaagacacgtccaagaaccagttctccctgaagttgaggtctgtgacggccgcggacacggccgtctactactgt

SEQ ID NO: 6336 - DNA, 114 bp, Homo sapiens
aactacgcacagaggttccagggcagagtcactattaccgcggacgaatccacgagtacagcttacatggagctgagcagcctgagatcggaagacacggccgtgtattactgt

SEQ ID NO: 6337 - DNA, 114 bp, Homo sapiens
agatataatccgtcctttcaaggccaaatctccatctcagccgacgactccaccacgaccgcctacctgcagtggcccagcctgaaggcctcggacagcggcacctattattgt

SEQ ID NO: 6338 - DNA, 114 bp, Homo sapiens
aactctgcacagaagtttcagggcagggtcaccatgaccagggacacgtccatcaccacagcctacatggacctgaccaggctgacatctgacgacacggccgtgtattactgt

SEQ ID NO: 6339 - DNA, 114 bp, Homo sapiens
  modified_base (14)..(14): a, c, t, g, unknown or other
  modified_base (32)..(32): a, c, t, g, unknown or other
  modified_base (53)..(53): a, c, t, g, unknown or other
  modified_base (56)..(57): a, c, t, g, unknown or other
  modified_base (59)..(61): a, c, t, g, unknown or other
  modified_base (71)..(71): a, c, t, g, unknown or other
gattctgcagtatntgtgaaaggtcgaatagncgtcaacgcagacccatccgnganncnnntctccctgcnactgaactctgtgactcccgaggacacggctgtctactattgt

SEQ ID NO: 6340 - DNA, 114 bp, Homo sapiens
aactacaacccctccctcaagggccgagtcaccgtttcagcagacccgtccacgaataccttctccctgaacctgatgtctatgaccgctgcggacaaggccgtctactactgt

SEQ ID NO: 6341 - DNA, 114 bp, Homo sapiens
tactacaacccgtccctcaagagtcgagtcgccatatccgtagacacgtccaagagccaggtctccctgaggctgagctctgtgaccgccgcagacacggctgtgtattattgt

SEQ ID NO: 6342 - DNA, 114 bp, Homo sapiens
  modified_base (52)..(52): a, c, t, g, unknown or other
gactttgtggactctgtgaagggccgattcaccatctccagagacaacgccnagagctcactgtttctgcaaatgaacagcctgagagccgaggacacggctgtgtattattgt

SEQ ID NO: 6343 - DNA, 114 bp, Homo sapiens
  modified_base (9)..(9): a, c, t, g, unknown or other
  modified_base (34)..(34): a, c, t, g, unknown or other
  modified_base (36)..(36): a, c, t, g, unknown or other
gattatgcngtgtctgtgaaaagtcgaatagccntnaacccagaaacatccaagaaccagttctccctgcagctgaactctgtgactcccgaggacacggctgtctattattgt

SEQ ID NO: 6344 - DNA, 114 bp, Homo sapiens
tactacgcagactccgtgaagggccggttcaccatctccagagacaattccaagaacacggtttatctgcaagtgaacagcctgagagccgaggacacggccgtatattactgt

SEQ ID NO: 6345 - DNA, 114 bp, Homo sapiens
tattacaaagactccgtgaagggccggttcaccctctccagagacaattccaagaacactctgtatctagaaatgaacagcctgacaactgacgacacggccgtttattactgt

SEQ ID NO: 6346 - DNA, 114 bp, Homo sapiens
gactacgcacagaggttccagggcagagtctccattaccgcggacaaagccacgactacagcctacatggacttgagcagcctgagatccgaggacacggccgtctactactgt

SEQ ID NO: 6347 - DNA, 114 bp, Homo sapiens
tacaacaacccgtccctcaagagtcgagtcaccatatcccttgacacgtccaagaaccagttctccctgaagctgacctctgtgaccgccgcagacacggctgtgtattactgt

SEQ ID NO: 6348 - DNA, 114 bp, Homo sapiens
aagtacgcacagaaatttcagggtagagtcacgattaccgcggacaaatccacgaacacagcctacttggagctgagcagactgagatctgaggacacggccgtgtactactgt

SEQ ID NO: 6349 - DNA, 114 bp, Homo sapiens
tattacgcagactccgtgaagggccggttcaccatctccagagacaattctaagaacacggtgtatctccaaataatttctctgcgggtcgaggacacggccgtatattattgc

SEQ ID NO: 6350 - DNA, 114 bp, Homo sapiens
aactacgcacagaagttccagggcagagtcacaattaccgcggacagatccacgagcacagcctacatggagctgagcagcctcagatctgaagacacgggcatgtattactgt

SEQ ID NO: 6351 - DNA, 114 bp, Homo sapiens
tactatgtagactccgtgaagggccgattcaccatctccagagacaatgccaagaacacgctgcatctgcaaatgaacagcctgagagctgaggacacggctgtgtattattgt

SEQ ID NO: 6352 - DNA, 114 bp, Homo sapiens
gactacgctgcacccgtgaaaggcagattcaccatctcaaaagatgattcaaagaagacggtctatctgcaaatggacagcctgaaaaccgaggacacagccatatattactgt

SEQ ID NO: 6353 - DNA, 114 bp, Homo sapiens
aactatgctgactcagtgaagggccgatttatcatctccagggacaactccaagagttcactgtttttggacatgagcgacctgcgagtcgaagattcggccctttattattgt

SEQ ID NO: 6354 - DNA, 114 bp, Homo sapiens
gactatgtggactctgtgaagggccgattcaccatctccagagacaacgccaagaactcactgtatctgcaaatgaacagcctgagagccgaggacacggctgtgtattattgt

SEQ ID NO: 6355 - DNA, 114 bp, Homo sapiens
ggctatgcggactctgtgaagggccgattcaccatctccagagacaacgccaaggactccctatatctgcaaatgaacagtctgagaactgaggacacggccttgtattactgt

SEQ ID NO: 6356 - DNA, 114 bp, Homo sapiens
aagtactcacagagatttcaggggagggtcaccatgaccacggacacgtccatcagcacagcctacatggacctgaagagtctcacaggtgacgacacggccgtctattattgt

SEQ ID NO: 6357 - DNA, 114 bp, Homo sapiens
cactataacccgtccctcacgagtcgagtcaccatagatgtagacaggcccaagaatcagttttccctgaaactgacctctgtgaccgccgcagacacggctgtctattactgt

SEQ ID NO: 6358 - DNA, 114 bp, Homo sapiens
gactacgctgcacccgtgaagggcagattcaccatctcaagagatgattcaaaaaacaccgtgtatctgcaaatgagcagcctgagaaccgaggacacagccgtgtattactgt

SEQ ID NO: 6359 - DNA, 114 bp, Homo sapiens
tactacaagccgtccctcaagagtcgcgtcagcatatctcttgacacgtccaagagttcgttctctctgaagctgacctctgtgaccgccgcagacacggctgtctatttctgt

SEQ ID NO: 6360 - DNA, 114 bp, Homo sapiens
tacgacaacccgtccctcaagagtcgagtcaccatatccgtagacacgtccaagaaccagttctccctgaagctgagctctgtgaccgccgcagacacggctgtgtattactgt

SEQ ID NO: 6361 - DNA, 114 bp, Homo sapiens
aactatgcacacaagtttcagggcagggtcaccatgaccagggacacgtccatcagcacagcctacatggagctgagcaggctgagatctgacgacacggccatgtattactgt

SEQ ID NO: 6362 - DNA, 114 bp, Homo sapiens
tactacaacccgtccctcaagagtcgagtcaccatatccgtagacacgtccaagaagcagttctccctgaagctgagctctgtgaccgccgcagacacggctgtgtattactgt

SEQ ID NO: 6363 - DNA, 114 bp, Homo sapiens
tactacacagactccgtggagggccgcttcaccatctccagagacaactccaagaacgtggtgtttcttcaaatgaacagcctgagagccgaggacacggccgtttatttctgt

SEQ ID NO: 6364 - DNA, 114 bp, Homo sapiens
tactacaacccgtccctcaagagtcgagtcaccatatccgtagacacgtccaagaaccagttctccctgaagctgagctctgtgaccgccgcagacacggctgtgtattactgt

SEQ ID NO: 6365 - DNA, 114 bp, Homo sapiens
tactatgcagactccgtgaagggccgattcaccatctccagagacaattccaagaacacgctgtatctgcaaatgaacagcctgagagctgaggacacggctgtgtattactgt

SEQ ID NO: 6366 - DNA, 114 bp, Homo sapiens
aactacaacccctccctcaagagtcgagtcaccatgtcagtagacacgtccaagaaccagttctccctgaagctgagctcagtgaccgctgcggacacggccatgtattactgt

SEQ ID NO: 6367 - DNA, 114 bp, Homo sapiens
gaatacgccgcgtctctgaaaggcagattcaccatctcaagagatgattccaaaagcgtcgcctatctgcaaatgaacagcctgaaaaccgaagacacagccgtgtatttttgt

SEQ ID NO: 6368 - DNA, 114 bp, Homo sapiens
tactacaacccgtccctcaagagtcgagttaccatatcagtagacacgtctaagaaccagttctccctgaagctgagctctgtgactgccgcggacacggccgtgtattactgt

SEQ ID NO: 6369 - DNA, 114 bp, Homo sapiens
tactatgcagactctgtgaagggccgattcaccatctccagagacaacagcaaaaactccctgtatctgcaaatgaacagtctgagaactgaggacaccgccttgtattactgt

SEQ ID NO: 6370 - DNA, 114 bp, Homo sapiens
aactatgcacagaagtttcagggcagggtcaccatgaccagggacacgtccatcagcacagcctacatggagctgagcaggctgagatctgacgacacggccgtgtattactgt

SEQ ID NO: 6371 - DNA, 114 bp, Homo sapiens; identical to SEQ ID NO: 6364

SEQ ID NO: 6372 - DNA, 114 bp, Homo sapiens; identical to SEQ ID NO: 6364

SEQ ID NO: 6373 - DNA, 114 bp, Homo sapiens; identical to SEQ ID NO: 1770

SEQ ID NO: 6374 - DNA, 114 bp, Homo sapiens
tattatgccgactccctgaagggccgattcaccatctccagagacaattccaagaacacgctgtatttgcaaatgaacaacctgagagctgaggactcgggtgtgtacttctgt

SEQ ID NO: 6375 - DNA, 114 bp, Homo sapiens
aactatgcacagaagctccagggcagagtcaccatgaccacagacacatccacgagcacagcctacatggagctgaggagcctgagatctgacgacacggccgtgtattactgt

SEQ ID NO: 6376 - DNA, 114 bp, Homo sapiens
tactacgcagactctgtgaagggccgattcaccatctccagggacaacgccaagaactcactgtatctgcaaatgaacagcctgagagccgaggacacggccgtgtattactgt

SEQ ID NO: 6377 - DNA, 114 bp, Homo sapiens; identical to SEQ ID NO: 6368

SEQ ID NO: 6378 - DNA, 114 bp, Homo sapiens
aactacagcccgtccttccaaggccacgtcaccatctcagctgacaagtccatcagcactgcctacctgcagtggagcagcctgaaggcctcggacaccgccatgtattactgt

SEQ ID NO: 6379 - DNA, 114 bp, Homo sapiens; identical to SEQ ID NO: 6365

SEQ ID NO: 6380 - DNA, 114 bp, Homo sapiens; identical to SEQ ID NO: 6369

SEQ ID NO: 6381 - DNA, 114 bp, Homo sapiens
tactatgtggactctgtgaagggccgattcaccatctccagagacaacgccaagaactcactgtatctgcaaatgaacagcctgagagccgaggacacggccgtgtattactgt

SEQ ID NO: 6382 - DNA, 114 bp, Homo sapiens
gactacgcagactccgtgaagggccgattcaccttctccagagacaattccaagaacacggtgtatcttcaaatgaacagcctgagagccgaggacacggccgtttattactgt

SEQ ID NO: 6383 - DNA, 114 bp, Homo sapiens
aactatgcacagaagtttcagggcagggtcaccatgaccagggacacggccatcagcacagcctacatggagctgagcaggctgagatctgacgacacggccgtgtattattgt

SEQ ID NO: 6384 - DNA, 114 bp, Homo sapiens; identical to SEQ ID NO: 6369

SEQ ID NO: 6385 - DNA, 114 bp, Homo sapiens; identical to SEQ ID NO: 6368

SEQ ID NO: 6386 - DNA, 114 bp, Homo sapiens
aactacaacccctccttcaagagtcgagtcaccatatcagtagactcgtccaagaaccaattctccctgaaactgagctctgtgaccgccgccgacacggccgtgtattactgt

SEQ ID NO: 6387 - DNA, 114 bp, Homo sapiens; identical to SEQ ID NO: 6370

SEQ ID NO: 6388 - DNA, 114 bp, Homo sapiens
tactacaacccgtccctcaagagtcgagtcaccatatccgtagacacgtccaagaaccagttctccctgaagctgagctctgtgaccgccgcagacacggctgtatattactgt

SEQ ID NO: 6389 - DNA, 114 bp, Homo sapiens
tactatccaggctccgtgaagggccgattcaccatctccagagaaaatgccaagaactccttgtatcttcaaatgaacagcctgagagccggggacacggctgtgtattactgt

SEQ ID NO: 6390 - DNA, 114 bp, Homo sapiens
ggctatgcggactctgtgaagggccgattcaccatcttcagaaacaacgccaagaactccctgtatctgcaaatgaacagtctgagagctgaggacacggccttgtattactgt

SEQ ID NO: 6391 - DNA, 114 bp, Homo sapiens
tactatgcagactccgtgaagggccgattcaccatctccagagacaattccaagaacacgctgtatctgcaaatgaacagcctgagagttgaggacacggctgtgtattactgt

SEQ ID NO: 6392 - DNA, 114 bp, Homo sapiens
gactacgctgcacccgtgaaaggcagattcaccatctcaagagatgaatcaaaaaacatgctgtatctgcaaatgaacagcctgaaaaccgaggacacagccatttattactgt

SEQ ID NO: 6393 - DNA, 114 bp, Homo sapiens; identical to SEQ ID NO: 6364

SEQ ID NO: 6394 - DNA, 114 bp, Homo sapiens
ttttatgcaaactctgtgaagggcagattcaccatctccagagacaattccaagaacacgctgtatcttcaaatgggcagcctgagcgctgaagacatggctgtgtattactgt

SEQ ID NO: 6395 - DNA, 114 bp, Homo sapiens; identical to SEQ ID NO: 6364

SEQ ID NO: 6396 - DNA, 114 bp, Homo sapiens
tactacaacccgtccctcaagagtcgagtcaccatatccgtagacacgtccaagaaccagttctccctgaggctgagctctgtgaccgccgcagacacggctgtgtattactgt

SEQ ID NO: 6397 - DNA, 114 bp, Homo sapiens
agatacagcccgtccttccaaggccaggtcaccatctcagccgacacgtccatcagcaccgcctacctgcagtggagcagcctgaaggcctcggacaccgccatgtactactgt

SEQ ID NO: 6398 - DNA, 114 bp, Homo sapiens; identical to SEQ ID NO: 6364

SEQ ID NO: 6399 - DNA, 114 bp, Homo sapiens; identical to SEQ ID NO: 6364

SEQ ID NO: 6400 - DNA, 114 bp, Homo sapiens; identical to SEQ ID NO: 6368

SEQ ID NO: 6401 - DNA, 114 bp, Homo sapiens; identical to SEQ ID NO: 1770

SEQ ID NO: 6402 - DNA, 114 bp, Homo sapiens; identical to SEQ ID NO: 6376

SEQ ID NO: 6403 - DNA, 114 bp, Homo sapiens
ttttatgccccgtcactcaggagccgtctgaccgtatcaatagacacgtctaacaaccacttctccctgaacctgacctctgtgactgccgcggacacggccgtctattactgt

SEQ ID NO: 6404 - DNA, 114 bp, Homo sapiens
aactacgcagactctgtgaagggccgattcaccatctccagagacaacgccaagaactcactgtatctgcaaatgaacagcctgagagccgaggacacggctgtgtattactgt

SEQ ID NO: 6405 - DNA, 114 bp, Homo sapiens; identical to SEQ ID NO: 1771

SEQ ID NO: 6406 - DNA, 114 bp, Homo sapiens; identical to SEQ ID NO: 1771

SEQ ID NO: 6407 - DNA, 114 bp, Homo sapiens; identical to SEQ ID NO: 6404

SEQ ID NO: 6408 - DNA, 114 bp, Homo sapiens; identical to SEQ ID NO: 6369

SEQ ID NO: 6409 - DNA, 114 bp, Homo sapiens
tactacgcagactctgtgaagggccgattcaccatctccagggacgacgccaagaactccctgtatctggaaatgcacagcctgagagccgaggacacggccgtatatttctgt

SEQ ID NO: 6410 - DNA, 114 bp, Homo sapiens; identical to SEQ ID NO: 6364

SEQ ID NO: 6411 - DNA, 114 bp, Homo sapiens; identical to SEQ ID NO: 1770

SEQ ID NO: 6412 - DNA, 114 bp, Homo sapiens
tactacgcagactctgtgaggggccgattcaccatctccagagacaacgccaagaactcactgtatctgcaaatgaacagcctgagagccgaggacacggctgtttattactgt

SEQ ID NO: 6413 - DNA, 114 bp, Homo sapiens
tactacgcagactcactgaagggccgattcaccatctccagagacaacgccaagaactcactgtatctgcaaatgaacagcctgagagccgaggacacgtctgtgtattactgt

SEQ ID NO: 6414 - DNA, 114 bp, Homo sapiens
agctacgcacagaagttccagggcagagtcaccatgaccagggacacgtccacgagcacagtctacatggagctgagcagcctgagatctgaggacacggccgtgtattactgt

SEQ ID NO: 6415 - DNA, 114 bp, Homo sapiens
tactacgcagactctgtgaagggccgattcaccatctccagagacaatgccaagaactcactgtatctgcaaatgaacagcctgagagacgaggacacggctgtgtattactgt

SEQ ID NO: 6416 - DNA, 114 bp, Homo sapiens; identical to SEQ ID NO: 6364

SEQ ID NO: 6417 - DNA, 114 bp, Homo sapiens
tactacaacccgtccctcaagagtcgagttaccatatcagtagacacgtccaagaaccagttctccctgaagctgagctctgtgactgccgcagacacggccgtgtattactgt

SEQ ID NO: 6418 - DNA, 114 bp, Homo sapiens
aactacaacccctccctcaagagtcgagtcaccatatcagtagacacgtccaagagtaacttctccctgaagctgagatctgtgaccgctgcggacacggccgtgtattactgt

SEQ ID NO: 6419 - DNA, 114 bp, Homo sapiens; identical to SEQ ID NO: 6404

SEQ ID NO: 6420 - DNA, 114 bp, Homo sapiens
  modified_base (7)..(8): a, c, t, g, unknown or other
  modified_base (19)..(20): a, c, t, g, unknown or other
  modified_base (27)..(27): a, c, t, g, unknown or other
  modified_base (39)..(40): a, c, t, g, unknown or other
  modified_base (58)..(58): a, c, t, g, unknown or other
  modified_base (71)..(72): a, c, t, g, unknown or other
  modified_base (77)..(77): a, c, t, g, unknown or other
  modified_base (83)..(83): a, c, t, g, unknown or other
  modified_base (103)..(103): a, c, t, g, unknown or other
aactacnncccgtccttcnnaggccangtcaccttctcnnctgacaagtccatcagcnctgcctacctgcnntggcncacccngagggcctcggacaccgccntgtattactgt

SEQ ID NO: 6421 - DNA, 114 bp, Homo sapiens
aactacaacccctccctcaagggtcgggtcaccatttcagtagacacgtccaagaaccagttcttcctggagctgaactctgtgaccgccgcagacacggccgtttattactgt

SEQ ID NO: 6422 - DNA, 114 bp, Homo sapiens; identical to SEQ ID NO: 6370

SEQ ID NO: 6423 - DNA, 114 bp, Homo sapiens; identical to SEQ ID NO: 6404

SEQ ID NO: 6424 - DNA, 114 bp, Homo sapiens; identical to SEQ ID NO: 6364

SEQ ID NO: 6425 - DNA, 114 bp, Homo sapiens; identical to SEQ ID NO: 1771

SEQ ID NO: 6426 - DNA, 114 bp, Homo sapiens; identical to SEQ ID NO: 6364

SEQ ID NO: 6427 - DNA, 114 bp, Homo sapiens; identical to SEQ ID NO: 6368

SEQ ID NO: 6428 - DNA, 114 bp, Homo sapiens
  modified_base (1)..(1): a, c, t, g, unknown or other
nactacaacccgtccctcaagagtcgagtcaccatatccgtagacacgtccaagaaccagttctccctgaagctgagctctgtgaccgccgcagacacggctgtgtattactgt

SEQ ID NO: 6429 - DNA, 114 bp, Homo sapiens; identical to SEQ ID NO: 6364

SEQ ID NO: 6430 - DNA, 114 bp, Homo sapiens
tactatgcagactccgtgaagggccgattcaccatctccagagacaattccaagaacacggtgtatctgcaaatgaacagcctgagagctgaggacacggctgtgtattactgt

SEQ ID NO: 6431 - DNA, 114 bp, Homo sapiens
tattatgcagacttcgtggagggccgattcatcatctccagagacaattctcagaatacgctgtttctgcaaatgcacagcctgagagccgaggacacggctgtatattactgt

SEQ ID NO: 6432 - DNA, 114 bp, Homo sapiens; identical to SEQ ID NO: 1771

SEQ ID NO: 6433 - DNA, 114 bp, Homo sapiens; identical to SEQ ID NO: 6404

SEQ ID NO: 6434 - DNA, 114 bp, Homo sapiens
aactatgcacagaagtttcagggcagggtcaccatgaccagggacacgtccatcaccacagcctacatggacctgagcaggctgagatctgacgacacggccgtgtattactgt

SEQ ID NO: 6435 - DNA, 39 bp, Homo sapiens
gcgagagggatgtattactatgagtcatacctccaacac

SEQ ID NO: 6436 - DNA, 36 bp, Homo sapiens
acagtgggtgatgttgttcactacggtctggacgtc

SEQ ID NO: 6437 - DNA, 54 bp, Homo sapiens
gcgacgaggggaacaatcggtcctttttcttactactactactacatggacgtc

SEQ ID NO: 6438 - DNA, 42 bp, Homo sapiens
gcaaaaggagactctcctaatatggaatacgcctttgactcc

SEQ ID NO: 6439 - DNA, 48 bp, Homo sapiens
gcgagacaacgtggatacaactatggtgcgaagatgtactttgacttc

SEQ ID NO: 6440 - DNA, 39 bp, Homo sapiens
gcgagagcgctccgtggtggtctcacttgtcttgacttt

SEQ ID NO: 6441 - DNA, 60 bp, Homo sapiens
gtgagaggcctcaatcaacgtgcttccatttttggagacgtccggtactggttcgacccc

SEQ ID NO: 6442 - DNA, 45 bp, Homo sapiens
actagagcaaatataatcacagctggttcgtccacctttgactac

SEQ ID NO: 6443 - DNA, 48 bp, Homo sapiens
gccagagatattacgatttttggagtggccaggtggacgtttgattct

SEQ ID NO: 6444 - DNA, 66 bp, Homo sapiens
gggaaagatatcaagtggacttattttgatagtagtacttattatgacggtgatggtttcgacttc

SEQ ID NO: 6445 - DNA, 54 bp, Homo sapiens
gcgacgaggggaacaatcggtcctttttcctactactactactacatggacgtc

SEQ ID NO: 6446 - DNA, 54 bp, Homo sapiens
gcgaggggaccatggttcgggatgtctttatacgccgcccgcagttttgatgtg

SEQ ID NO: 6447 - DNA, 30 bp, Homo sapiens; identical to SEQ ID NO: 1788

SEQ ID NO: 6448 - DNA, 57 bp, Homo sapiens
ttgagagagccccgagagggtggcggtggtaatgccttctactggtacttcgatctc

SEQ ID NO: 6449 - DNA, 66 bp, Homo sapiens
gcgagaggcttggggaaccgcattacgatttatggagtgcttgttaccagaaactggctcgacccc

SEQ ID NO: 6450 - DNA, 54 bp, Homo sapiens
gcgagaagcgatgattgtactaatggtgtatgctatacccggcactttgactac

SEQ ID NO: 6451 - DNA, 42 bp, Homo sapiens
gccagacatgagacctccccggggggagactactttaaccac

SEQ ID NO: 6452 - DNA, 60 bp, Homo sapiens
gcgagcctgaagcacaacgattgttttagtttcggctgtccacactggtacctcgatctc

SEQ ID NO: 6453 - DNA, 87 bp, Homo sapiens
gcgagcagccctattgtagtagtaccagctgccccacgagaattatactactcccctgggggctactactactactacatggacgtc

SEQ ID NO: 6454 - DNA, 33 bp, Homo sapiens
gcgagagatcggggtattgatgcttttgatatc

SEQ ID NO: 6455 - DNA, 60 bp, Homo sapiens
gcgagcctcaagcacgacgattgttatagtaccgcctgtccacactggtacttcgatctc

SEQ ID NO: 6456 - DNA, 54 bp, Homo sapiens
ctgacagatcaacatgacgggtgtaccagtgccagctgccataaaatggacgtc

SEQ ID NO: 6457 - DNA, 48 bp, Homo sapiens
gcgagatatgtggggaatcgaggaccaacctcctactactttgactac

SEQ ID NO: 6458 - DNA, 45 bp, Homo sapiens
gcgagagtcggaatgagtgatggttattactacgtctttgactct

SEQ ID NO: 6459 - DNA, 42 bp, Homo sapiens
gcgagagcaggcgattgggactataatccccactttgcctcc

SEQ ID NO: 6460 - DNA, 36 bp, Homo sapiens
gcgaggataaggcggggaactagcggttatgactac

SEQ ID NO: 6461 - DNA, 42 bp, Homo sapiens
gcgacacggggacccgtggtcctaggtgaagcccttgcctac

SEQ ID NO: 6462 - DNA, 48 bp, Homo sapiens
actaatggtctaacaggaccagcctatgtcaatgcagagtttgaattc

SEQ ID NO: 6463 - DNA, 66 bp, Homo sapiens
gtgaaagtctctgggtatgccagtggctggttggcccctttcgggccagtaggacacttgagccac

SEQ ID NO: 6464 - DNA, 45 bp, Homo sapiens
gtcggccaaggaaaaactaactggggatggacgggaatgccctac

SEQ ID NO: 6465 - DNA, 27 bp, Homo sapiens
gtcggtggttcacggtcttttgatatc

SEQ ID NO: 6466 - DNA, 66 bp, Homo sapiens
gcgagacaagttttttatgacaacgatgactccgacgggttggggtactactacggtctggacgtc

SEQ ID NO: 6467 - DNA, 60 bp, Homo sapiens
gcgagaggcctcaatcaacgttcctcgatttttggagtcgtccgccactgtttcgacccc

SEQ ID NO: 6468 - DNA, 51 bp, Homo sapiens
gcgagaggggagggctatgccggtgttccgacacccaactggttcgacccc

SEQ ID NO: 6469 - DNA, 33 bp, Homo sapiens
tcgagagacgtggatgggggatattttgactac

SEQ ID NO: 6470 - DNA, 51 bp, Homo sapiens; identical to SEQ ID NO: 6468

SEQ ID NO: 6471 - DNA, 51 bp, Homo sapiens
gcgaaagatggtccgacctccgcccactacgtacagtgggactttgactac

SEQ ID NO: 6472 - DNA, 33 bp, Homo sapiens
gccagagggggggtatggttcgggtccctcagg

SEQ ID NO: 6473 - DNA, 66 bp, Homo sapiens
gcgaaagagtacatttgtagtggtggtacctgctactcgtttcgttcctactactacatggacgtc

SEQ ID NO: 6474 - DNA, 30 bp, Homo sapiens
gcgaggttaagagatgcctacagtgactat

SEQ ID NO: 6475 - DNA, 42 bp, Homo sapiens
gcaaaggacggactgcgatattttgggttttaccttgactcc

SEQ ID NO: 6476 - DNA, 45 bp, Homo sapiens
gcaaaagattctagtccgggctacttcttttacggtatggacgtc

SEQ ID NO: 6477 - DNA, 45 bp, Homo sapiens
  modified_base (3)..(3): a, c, t, g, unknown or other
  modified_base (5)..(5): a, c, t, g, unknown or other
gcnanaatggggtggcttttagtggcctcctactactttgaccac

SEQ ID NO: 6478 - DNA, 63 bp, Homo sapiens
gcgagagtagcccgaatttgtactaatggtgcatgctatgagggggcatactactttgacaac

SEQ ID NO: 6479 - DNA, 69 bp, Homo sapiens
gtaaaagataaaggatacagttctgggtacgatgatgtcgccggctactactggtacactatggacgtc

SEQ ID NO: 6480 - DNA, 51 bp, Homo sapiens
gcgaaaactagacgtataactgcaaccaggtattactacggtatggacgtc

SEQ ID NO: 6481 - DNA, 48 bp, Homo sapiens
gtgagacgtgagaggcccctccgttcagggagggctccttttgacacc

SEQ ID NO: 6482 - DNA, 51 bp, Homo sapiens
gcgaaggggtcccgctatataacgatttttggagccaaccccccggactac

SEQ ID NO: 6483 - DNA, 54 bp, Homo sapiens
gcgaggtcgcgacaacgtggatatagttcctacgacaagggggactttgactac

SEQ ID NO: 6484 - DNA, 57 bp, Homo sapiens
gcgagagacttccataatacgatttttggagtggtcatcccgaggtacttcgatctc

SEQ ID NO: 6485 - DNA, 45 bp, Homo sapiens
gtaaaacatagcgttggctacgctggttcggggagttttgactcc

SEQ ID NO: 6486 - DNA, 39 bp, Homo sapiens
gcaaaagatcggagtggttatttctacgctttacacttc

SEQ ID NO: 6487 - DNA, 42 bp, Homo sapiens
gcaagatgtcccgtagcaacacctggtagaggggttgactat

SEQ ID NO: 6488 - DNA, 45 bp, Homo sapiens
gtaaaacataacctaggctattctggttcggggacttttgactac

SEQ ID NO: 6489 - DNA, 57 bp, Homo sapiens
gtctattactgtgcgagaggcgccacttacagaagctcgtcgggttattgggagtac

SEQ ID NO: 6490 - DNA, 42 bp, Homo sapiens
gcgaaagatccttcttatggctcggggagttattcgcagtac

SEQ ID NO: 6491 - DNA, 42 bp, Homo sapiens
gcgagagatcgtcatgactatggtgaagatccttttgatatc

SEQ ID NO: 6492 - DNA, 42 bp, Homo sapiens
gcaaaagacggactgcgttattttgggttttatcttgactcc

SEQ ID NO: 6493 - DNA, 45 bp, Homo sapiens
acgagagaagcggggctatggcccgagccgtactactttgactcc

SEQ ID NO: 6494 - DNA, 45 bp, Homo sapiens
gcgagacaacccggtcgcgatagtagtggttattaccttgactcc

SEQ ID NO: 6495 - DNA, 60 bp, Homo sapiens
gcgaaacgttcggcagactgcagcagtaccagctgctcgggaggcagttggttcgacccc

SEQ ID NO: 6496 - DNA, 39 bp, Homo sapiens
gcgcgaaccatcgggatagtgacgacctactttgaatac

SEQ ID NO: 6497 - DNA, 48 bp, Homo sapiens
gcgagagatcgaggggatgttcttgtagctcagggagccatcgggtac

SEQ ID NO: 6498 - DNA, 42 bp, Homo sapiens
gcgagattacactatagcaccacctggcactatttcgacccc

SEQ ID NO: 6499 - DNA, 48 bp, Homo sapiens
gcgagagattcggaagctacaacgacacgggggaggtggttcgacccc

SEQ ID NO: 6500 - DNA, 54 bp, Homo sapiens
gcgaaggcgggggatagtgggagctcacactgctactactactacatggatgtc

SEQ ID NO: 6501 - DNA, 60 bp, Homo sapiens
gcgaaaaatagaaattatcgtccttcgggggactttgcggaggggcactggctcgacccc

SEQ ID NO: 6502 - DNA, 45 bp, Homo sapiens
acgaaggtcgatagcagtccctttttcgactatggtatggacgtc

SEQ ID NO: 6503 - DNA, 51 bp, Homo sapiens
gcgagagatctccttaaacccccaaatatcgaccctacagtaaaaggtttg

SEQ ID NO: 6504 - DNA, 60 bp, Homo sapiens
actagagatatccggggcggatacagttatggttactttgttccttactactttgactac

SEQ ID NO: 6505 - DNA, 51 bp, Homo sapiens
gcgagaatgggattcgttggttcctttacttcggggacttatatcgactac

SEQ ID NO: 6506 - DNA, 42 bp, Homo sapiens
gcgagaatccacgattttcggagtggttttccccttgattac

SEQ ID NO: 6507 - DNA, 63 bp, Homo sapiens
gcgagagatgattgtagtattaccacctgtcgcgttccaaatcaggaccatgcttttgatatc

SEQ ID NO: 6508 - DNA, 48 bp, Homo sapiens
gcgagagcggcgtggcgggatggtaatgatggttattttcttgactac

SEQ ID NO: 6509 - DNA, 36 bp, Homo sapiens
gcgaagcgaggtgactggctatggtactttgacgtc

SEQ ID NO: 6510 - DNA, 66 bp, Homo sapiens
gcgagactcgtgcccgcagagccgtctggcccgggtaattacttctactacttcttcatggacgtc

SEQ ID NO: 6511 - DNA, 33 bp, Homo sapiens
gcgagaggtactacggccaccgggatggacgtc

SEQ ID NO: 6512 - DNA, 36 bp, Homo sapiens
gcgagagtagggagaaggagttggtacgtggactat

SEQ ID NO: 6513 - DNA, 21 bp, Homo sapiens
acgagaggagaccctgactac

SEQ ID NO: 6514 - DNA, 51 bp, Homo sapiens
gcgagaaaagtaaggggcagctcgcccgaccccctttactactttgactac

SEQ ID NO: 6515 - DNA, 39 bp, Homo sapiens
acgcgtaatagtccaattaccgtttttggagttggcccc

SEQ ID NO: 6516 - DNA, 42 bp, Homo sapiens
gcgagagggctcaattactattactatcacggtatggacgtc

SEQ ID NO: 6517 - DNA, 42 bp, Homo sapiens
gcgagaggcctcaattactattactatcacggcatggacgtc

SEQ ID NO: 6518 - DNA, 48 bp, Homo sapiens
gcgaaacttaggagaggtgtaatgcttattaagtactactttgacttc

SEQ ID NO: 6519 - DNA, 42 bp, Homo sapiens
gcgagagatgccgggcgctttttggcctacggtatggacgtc

SEQ ID NO: 6520 - DNA, 36 bp, Homo sapiens
gcgactgggtacggttttgtgggacctcttgcctac

SEQ ID NO: 6521 - DNA, 27 bp, Homo sapiens
tacgggggcgatactgaggtgcgatac

SEQ ID NO: 6522 - DNA, 48 bp, Homo sapiens
gtgaggtgctttggatacagctctaataccccggcgtactttgattac

SEQ ID NO: 6523 - DNA, 48 bp, Homo sapiens
gcgagagattttaggccttacgatcttttgactggtttgtttgactcc

SEQ ID NO: 6524 - DNA, 36 bp, Homo sapiens
gcgaccttcagtcagggggggctacaaaatgactac

SEQ ID NO: 6525 - DNA, 33 bp, Homo sapiens
gcgattgtatcccgttccttcgttatggacgtc

SEQ ID NO: 6526 - DNA, 48 bp, Homo sapiens
gcgaaaacactaagaaagaggaatggttactctggccccattgactcc

SEQ ID NO: 6527 - DNA, 45 bp, Homo sapiens
gcgagggatgacactggtatttccaagaaaaatgcttttgatatt

SEQ ID NO: 6528 - DNA, 57 bp, Homo sapiens
gcgagagataacctgccttccctttacggtgactacgaccggaatgcttttgacatc

SEQ ID NO: 6529 - DNA, 39 bp, Homo sapiens
gcgaaaggtcggaactactacgtggactactttgactac

SEQ ID NO: 6530 - DNA, 42 bp, Homo sapiens
gcgagagggctcaattactattattatcatggaatggacgtc

SEQ ID NO: 6531 - DNA, 45 bp, Homo sapiens
gcgagagactcccgtatagtgcctactaattactattatgacttc

SEQ ID NO: 6532 - DNA, 36 bp, Homo sapiens
gcgagagatcccggtggcagctcttcctttgactac

SEQ ID NO: 6533 - DNA, 54 bp, Homo sapiens
gcgagagttcgttgtggtggtctctgctattcctcggactggtacttcgatgtc

SEQ ID NO: 6534 - DNA, 42 bp, Homo sapiens
gcgagagggctcaattactacttttatcacggtatggacctc

SEQ ID NO: 6535 - DNA, 42 bp, Homo sapiens
gcgaaagggctgaattattattattaccacggaatggacgtt

SEQ ID NO: 6536 - DNA, 60 bp, Homo sapiens
gcgaaagacactgccacggtgactacctcactttatttctattaccacggaatggacgtc

SEQ ID NO: 6537 - DNA, 48 bp, Homo sapiens
gcgaaatctcaaggccccttttacagtgactacgtctactttgagtcc

SEQ ID NO: 6538 - DNA, 54 bp, Homo sapiens
gcgagagaggggagttatggtgacacctatcactcctattacggtatggacgtc

SEQ ID NO: 6539 - DNA, 42 bp, Homo sapiens
accgctgatctcagcacctcgtccgggcactactttgactac

SEQ ID NO: 6540 - DNA, 36 bp, Homo sapiens
gcgaggcacagttatgctctccccccccgtgactac

SEQ ID NO: 6541 - DNA, 39 bp, Homo sapiens
gcgagagggggggggtggctacaatcggactttgacatc

SEQ ID NO: 6542 - DNA, 60 bp, Homo sapiens
gcgagtagcagtggctggcccagcgaccgctatttccaccactactccgggttggacgtc

SEQ ID NO: 6543 - DNA, 27 bp, Homo sapiens
gcgggacatacaagcacgactaacttt

SEQ ID NO: 6544 - DNA, 39 bp, Homo sapiens
gcgaggggggattgtactagtaccagctgttatgtccac

SEQ ID NO: 6545 - DNA, 60 bp, Homo sapiens
gtaagagagggtcgtgaatacggcgaccgcttctcggtccccaactggtatttcgatctc

SEQ ID NO: 6546 - DNA, 54 bp, Homo sapiens
gcgagacacccctcgtatctagccgtggctgacggaagggatgcttttgatatc

SEQ ID NO: 6547 - DNA, 57 bp, Homo sapiens
gcgagacagccgcctattacgatttttggacttctcaggccggggtggttcggctcc

SEQ ID NO: 6548 - DNA, 54 bp, Homo sapiens
gcgagagaggggagctatggtgacacctatcactcctactacgctatggacgtc

SEQ ID NO: 6549 - DNA, 60 bp, Homo sapiens
  modified_base (60)..(60): a, c, t, g, unknown or other
gcaagagagggtcgtgagtacggtgaccgcttctcggtcccctactggtacttcgatctn

SEQ ID NO: 6550 - DNA, 39 bp, Homo sapiens
gcgagaggcgtcttttcccccgcatattattttgagtac

SEQ ID NO: 6551 - DNA, 39 bp, Homo sapiens
gcgaaaatcgcggtcagtgggcaatggtacttcgatctc

SEQ ID NO: 6552 - DNA, 33 bp, Homo sapiens
gtagtctttattacgccaacgataaattatacc

SEQ ID NO: 6553 - DNA, 57 bp, Homo sapiens
gcgaggctcgggggcactggcttgaacgggggagacttccaatacggtgtggacatc

SEQ ID NO: 6554 - DNA, 66 bp, Homo sapiens
tcgagacttaatccttcgaggagaccaccacctggggtgccacactactactatggtatggacgtc

SEQ ID NO: 6555 - DNA, 48 bp, Homo sapiens
acgagttgttggcccatcctgaatcactattcccctaggccatcctcc

SEQ ID NO: 6556 - DNA, 42 bp, Homo sapiens
gcgagcgcgttgcggtatagttttgtttacggtatggacgtc

SEQ ID NO: 6557 - DNA, 39 bp, Homo sapiens
gtgaaagatgcctataacagtggctggcactttgactac

SEQ ID NO: 6558 - DNA, 27 bp, Homo sapiens
accaaacagactggagattttgactcc

SEQ ID NO: 6559 - DNA, 48 bp, Homo sapiens
gtcagttcatattgtagaggaaacaactgctatggagccccaaactac

SEQ ID NO: 6560 - DNA, 54 bp, Homo sapiens
gcgagagaggggagctatggtgacacctatcacttctactacgctatggacgtc

SEQ ID NO: 6561 - DNA, 24 bp, Homo sapiens
gtaacccaacagtctttcgatctc

SEQ ID NO: 6562 - DNA, 36 bp, Homo sapiens
gccaaaatcctgcctggaatttatgcctttgatctt

SEQ ID NO: 6563 - DNA, 48 bp, Homo sapiens
gcgagaacgggtggatacagctttgattactcggactactttgacttc

SEQ ID NO: 6564 - DNA, 42 bp, Homo sapiens
gccataccgccggtcccttactactactactactcggacgtc

SEQ ID NO: 6565 - DNA, 57 bp, Homo sapiens
gcgagacaaagacgtgtttcgatttttggattacttctgccaggggagtttgacacc

SEQ ID NO: 6566 - DNA, 63 bp, Homo sapiens
gcgagacataatgaccattattgtagtagtaccagctgctatcccgtcgggtacttcgatctc

SEQ ID NO: 6567 - DNA, 60 bp, Homo sapiens
gcgagagccctctattactatgatagtagtggttttccagtcctctactactttgactac

SEQ ID NO: 6568 - DNA, 42 bp, Homo sapiens
gcgagacttccacggggtgatacgctctactactttgactac

SEQ ID NO: 6569 - DNA, 39 bp, Homo sapiens
gcgaaaggagccaactggggatcttggttccttgactcc

SEQ ID NO: 6570 - DNA, 63 bp, Homo sapiens
gcgggccgcaggggatacgatttttggagtggttattataactactactacggtatggacgtc

SEQ ID NO: 6571 - DNA, 54 bp, Homo sapiens
gcgaaagaggggtgggcatattgtggtggtgactgctattcatactttgactac

SEQ ID NO: 6572 - DNA, 51 bp, Homo sapiens
gcgagaggcaagaggggtgggaaccccgatttttcgcagcggttcgacccc

SEQ ID NO: 6573 - DNA, 66 bp, Homo sapiens
gctagaggggggcatacagctatggttacgaccccgtatttctactactactacggtatggacgtc

SEQ ID NO: 6574 - DNA, 54 bp, Homo sapiens
gcgagagctcctgacgatttttggagtggttattgggggtactactttgactac

SEQ ID NO: 6575 - DNA, 54 bp, Homo sapiens
gcaaactcggagtgggagctactcggtccttctacttggtggtacttcgatctc

SEQ ID NO: 6576 - DNA, 30 bp, Homo sapiens
gcgagagaagaaggtgggagctactttgac

SEQ ID NO: 6577 - DNA, 54 bp, Homo sapiens
gggagacatgccgtaacgacatggtataactggaactatcacccatttgactac

SEQ ID NO: 6578 - DNA, 48 bp, Homo sapiens
gcgagacatcccgtcaactacggtgactacgtagagtggttcgacccc

SEQ ID NO: 6579 - DNA, 39 bp, Homo sapiens; identical to SEQ ID NO: 1861

SEQ ID NO: 6580 - DNA, 60 bp, Homo sapiens
gcgaaagttggctggtccctgcagtggcttaatttgggctactctaacgacatggacgtc

SEQ ID NO: 6581 - DNA, 60 bp, Homo sapiens
gcgagatcacacacttcggggagttatttgtggcgggatctcccgtactggttcgacccc

SEQ ID NO: 6582 - DNA, 75 bp, Homo sapiens
gcgagagaagggcataggcatagcagcaggtggcgagacacgggctattactactactactactacatggacgtc

SEQ ID NO: 6583 - DNA, 54 bp, Homo sapiens
gcgagagattctaatgaggcagctcgagggtcggagtactggtacttcgatctc

SEQ ID NO: 6584 - DNA, 60 bp, Homo sapiens
  modified_base (59)..(59): a, c, t, g, unknown or other
gcgagacaagattactatgatagtagtggttactccacggagtattacggtatggacgnc

SEQ ID NO: 6585 - DNA, 57 bp, Homo sapiens
gcgaaagatcagtccggttttgtactaatggtgtatgctatacattcgcctgggtac

SEQ ID NO: 6586 - DNA, 18 bp, Homo sapiens
gcaaaagatggcggtgac

SEQ ID NO: 6587 - DNA, 48 bp, Homo sapiens
gcgagagagggtagcagcagctgggagttttacaactggttcgacccc

SEQ ID NO: 6588 - DNA, 39 bp, Homo sapiens
gcgaaattgatggtggacctcgactattatatggacgtc

SEQ ID NO: 6589 - DNA, 51 bp, Homo sapiens
gcgagagaccccacgccatacagtaacgctcagctatgttggttcgacccc

SEQ ID NO: 6590 - DNA, 45 bp, Homo sapiens
gcaaaagacccgttacgatacagctctttatacggtatggacgtc

SEQ ID NO: 6591 - DNA, 54 bp, Homo sapiens
gcgagaggacaggattacgatattttgactcgtagttcatactacatggacgtc

SEQ ID NO: 6592 - DNA, 45 bp, Homo sapiens
gcgagagaaagccatgactacagtaactatcgattctttgactcc

SEQ ID NO: 6593 - DNA, 72 bp, Homo sapiens
gcgagccccctaggatattgtagtagtaccagctgctatagaacttactactactactacggtatggacgtc

SEQ ID NO: 6594 - DNA, 51 bp, Homo sapiens
gcgagactgacggttccctcaattagatcgtggtcgtccaggttcgacccc

SEQ ID NO: 6595 - DNA, 24 bp, Homo sapiens
gcaagagacctgtccatggacgtc

SEQ ID NO: 6596 - DNA, 33 bp, Homo sapiens
tcacagggggacggtacggtggggtttcactac

SEQ ID NO: 6597 - DNA, 36 bp, Homo sapiens
gcgagaatccactacggtgactacttcgttgactcc

SEQ ID NO: 6598 - DNA, 27 bp, Homo sapiens
accacaggtactacgtactttgactac

SEQ ID NO: 6599 - DNA, 54 bp, Homo sapiens
gcgagacatgccgtaacgacatggtataactggaactatcacccatttgactac

SEQ ID NO: 6600 - DNA, 42 bp, Homo sapiens
gcgagagatggaggggatgaattcgctgaatacttccagcac

SEQ ID NO: 6601 - DNA, 57 bp, Homo sapiens
gcgagtcaagtgggactacgcgtagttatttcttactactactactacatggacgtc

SEQ ID NO: 6602 - DNA, 48 bp, Homo sapiens
gcgagacatccggtcgagtatagcagcttagctggagcttttgatatc

SEQ ID NO: 6603 - DNA, 51 bp, Homo sapiens
gcgagacaaggcgctggggatcttccctacaagtactacttcatggacgtc

SEQ ID NO: 6604 - DNA, 45 bp, Homo sapiens
gcgagacatccagtagagtatagtagctcgtccggctttgactac

SEQ ID NO: 6605 - DNA, 48 bp, Homo sapiens
gcgagcctgtattacgatttttggagtggttatttcggtggggactac

SEQ ID NO: 6606 - DNA, 51 bp, Homo sapiens
gcgagatcgacgccgtataactggaactccccgtcccccgcctttgactac

SEQ ID NO: 6607 - DNA, 33 bp, Homo sapiens
gcgagagatagggaaaactggtacttcgatctc

SEQ ID NO: 6608 - DNA, 45 bp, Homo sapiens
gcgagagatggggatagcagtggctggtacgccagatttgactac

SEQ ID NO: 6609 - DNA, 42 bp, Homo sapiens
gcgagaggtctccgggaccccttatcgtggtacttggacgtc

SEQ ID NO: 6610 - DNA, 51 bp, Homo sapiens
gcgagagatcccgaccaactatttgtacaggacccatactactttgactac

SEQ ID NO: 6611 - DNA, 63 bp, Homo sapiens
gcgagaggaagtctggacgatttttggagtggttggatcgaagattactactacatggacgtc

SEQ ID NO: 6612 - DNA, 63 bp, Homo sapiens; identical to SEQ ID NO: 6611

SEQ ID NO: 6613 - DNA, 51 bp, Homo sapiens; identical to SEQ ID NO: 6610

SEQ ID NO: 6614 - DNA, 51 bp, Homo sapiens
gcaaaagatccgaccccgtatagtgggagatacttcacctggttcgacccc

SEQ ID NO: 6615 - DNA, 51 bp, Homo sapiens
gcgagagatccggggggctttggagtggtcgccccatactactttgactac

SEQ ID NO: 6616 - DNA, 48 bp, Homo sapiens
gcgagacaccccgtcaactacggtgactacgtagagtggttcgacccc

SEQ ID NO: 6617 - DNA, 39 bp, Homo sapiens; identical to SEQ ID NO: 1861

SEQ ID NO: 6618 - DNA, 66 bp, Homo sapiens
gcgagagtagggactgagcgtattacgatttttggagtggttattagtgcggcggctatggacgtc

SEQ ID NO: 6619 - DNA, 57 bp, Homo sapiens
gcgagatcggtctacgacacgaaaccaatgacttactactactactacatggacgtc

SEQ ID NO: 6620 - DNA, 48 bp, Homo sapiens
gcgagaggcgtattactatggtttggggagaacgaaaacaatgactac

SEQ ID NO: 6621 - DNA, 54 bp, Homo sapiens
gcgagacggggtggggcgtgcggtagtggtggtagctgcttgccttttgactac

SEQ ID NO: 6622 - DNA, 45 bp, Homo sapiens
gcgagacatggtgtagagtatagcacctcgtcgtgctttgactac

SEQ ID NO: 6623 - DNA, 39 bp, Homo sapiens
gccagaggacggagtggcagctcgtgggactttggctac

SEQ ID NO: 6624 - DNA, 51 bp, Homo sapiens
gcgagaggcaagaggggtgggaaccccgatttttcgcagaggttcgacccg

SEQ ID NO: 6625 - DNA, 51 bp, Homo sapiens; identical to SEQ ID NO: 6610

SEQ ID NO: 6626 - DNA, 27 bp, Homo sapiens
gcgagacaacgatcggagcatgactac

SEQ ID NO: 6627 - DNA, 42 bp, Homo sapiens
gcgagaccttcaagggagggatacctggattattttgatgtc

SEQ ID NO: 6628 - DNA, 66 bp, Homo sapiens
gcgacctcgaccttaaatatagtggctacgattggtccccattactactactacggtatggacgtc

SEQ ID NO: 6629 - DNA, 51 bp, Homo sapiens; identical to SEQ ID NO: 6610

SEQ ID NO: 6630 - DNA, 42 bp, Homo sapiens
gcgagacatctacgcggtgatttcgtcggacagtttgactac

SEQ ID NO: 6631 - DNA, 63 bp, Homo sapiens; identical to SEQ ID NO: 6611

SEQ ID NO: 6632 - DNA, 54 bp, Homo sapiens
gcggggaaaacttacgatttttggagtggttatcctataaaggttgttgactac

SEQ ID NO: 6633 - DNA, 54 bp, Homo sapiens; identical to SEQ ID NO: 6574

SEQ ID NO: 6634 - DNA, 57 bp, Homo sapiens
gcgagactgaagggggggtgggagctacttatctactactactactacatggacgtc

SEQ ID NO: 6635 - DNA, 45 bp, Homo sapiens
gcgagacggggggaaggctatagcagctcgtccagctttgactac

SEQ ID NO: 6636 - DNA, 39 bp, Homo sapiens
gcgaaagattcggaaggctacgagtactactttgactac

SEQ ID NO: 6637 - DNA, 39 bp, Homo sapiens
gggagagtggccggtgggacctactcttggtttgacttc

SEQ ID NO: 6638 - DNA, 51 bp, Homo sapiens
gcgagtctacgggtggatacagctatggttacgtggggggatcaagactac

SEQ ID NO: 6639 - DNA, 51 bp, Homo sapiens; identical to SEQ ID NO: 6610

SEQ ID NO: 6640 - DNA, 78 bp, Homo sapiens
gcgagaattggtgttaagggggggtcctacgatttttggagtggttattatcccaacccaggtggatactttgactac

SEQ ID NO: 6641 - DNA, 45 bp, Homo sapiens
tgtgcgagagggatgtattactatgagtcatacctccaacactgg

SEQ ID NO: 6642 - DNA, 42 bp, Homo sapiens
tgcacagtgggtgatgttgttcactacggtctggacgtctgg

SEQ ID NO: 6643 - DNA, 60 bp, Homo sapiens
tgtgcgacgaggggaacaatcggtcctttttcttactactactactacatggacgtctgg

SEQ ID NO: 6644 - DNA, 48 bp, Homo sapiens
tgtgcaaaaggagactctcctaatatggaatacgcctttgactcctgg

SEQ ID NO: 6645 - DNA, 54 bp, Homo sapiens
tgtgcgagacaacgtggatacaactatggtgcgaagatgtactttgacttctgg

SEQ ID NO: 6646 - DNA, 45 bp, Homo sapiens
tgtgcgagagcgctccgtggtggtctcacttgtcttgacttttgg

SEQ ID NO: 6647 - DNA, 66 bp, Homo sapiens
tgtgtgagaggcctcaatcaacgtgcttccatttttggagacgtccggtactggttcgacccctgg

SEQ ID NO: 6648 - DNA, 51 bp, Homo sapiens
tgtactagagcaaatataatcacagctggttcgtccacctttgactactgg

SEQ ID NO: 6649 - DNA, 54 bp, Homo sapiens
tgtgccagagatattacgatttttggagtggccaggtggacgtttgattcttgg

SEQ ID NO: 6650 - DNA, 72 bp, Homo sapiens
tgtgggaaagatatcaagtggacttattttgatagtagtacttattatgacggtgatggtttcgacttctgg

SEQ ID NO: 6651 - DNA, 60 bp, Homo sapiens
tgtgcgacgaggggaacaatcggtcctttttcctactactactactacatggacgtctgg

SEQ ID NO: 6652 - DNA, 60 bp, Homo sapiens
tgtgcgaggggaccatggttcgggatgtctttatacgccgcccgcagttttgatgtgtgg

SEQ ID NO: 6653 - DNA, 36 bp, Homo sapiens; identical to SEQ ID NO: 1879

SEQ ID NO: 6654 - DNA, 63 bp, Homo sapiens
tgtttgagagagccccgagagggtggcggtggtaatgccttctactggtacttcgatctctgg

SEQ ID NO: 6655 - DNA, 72 bp, Homo sapiens
tgtgcgagaggcttggggaaccgcattacgatttatggagtgcttgttaccagaaactggctcgacccctgg

SEQ ID NO: 6656 - DNA, 60 bp, Homo sapiens
tgtgcgagaagcgatgattgtactaatggtgtatgctatacccggcactttgactactgg

SEQ ID NO: 6657 - DNA, 48 bp, Homo sapiens
tgtgccagacatgagacctccccggggggagactactttaaccactgg

SEQ ID NO: 6658 - DNA, 66 bp, Homo sapiens
tgtgcgagcctgaagcacaacgattgttttagtttcggctgtccacactggtacctcgatctctgg

SEQ ID NO: 6659 - DNA, 93 bp, Homo sapiens
tgtgcgagcagccctattgtagtagtaccagctgccccacgagaattatactactcccctgggggctactactactactacatggacgtctgg

SEQ ID NO: 6660 - DNA, 39 bp, Homo sapiens
tgtgcgagagatcggggtattgatgcttttgatatctgg

SEQ ID NO: 6661 - DNA, 66 bp, Homo sapiens
tgtgcgagcctcaagcacgacgattgttatagtaccgcctgtccacactggtacttcgatctctgg

SEQ ID NO: 6662 - DNA, 60 bp, Homo sapiens
tgcctgacagatcaacatgacgggtgtaccagtgccagctgccataaaatggacgtctgg

SEQ ID NO: 6663 - DNA, 54 bp, Homo sapiens
tgtgcgagatatgtggggaatcgaggaccaacctcctactactttgactactgg

SEQ ID NO: 6664 - DNA, 51 bp, Homo sapiens
tgtgcgagagtcggaatgagtgatggttattactacgtctttgactcttgg

SEQ ID NO: 6665 - DNA, 48 bp, Homo sapiens
tgtgcgagagcaggcgattgggactataatccccactttgcctcctgg

SEQ ID NO: 6666 - DNA, 42 bp, Homo sapiens
tgcgcgaggataaggcggggaactagcggttatgactactgg

SEQ ID NO: 6667 - DNA, 48 bp, Homo sapiens
tgtgcgacacggggacccgtggtcctaggtgaagcccttgcctactgg

SEQ ID NO: 6668 - DNA, 54 bp, Homo sapiens
tgtactaatggtctaacaggaccagcctatgtcaatgcagagtttgaattctgg

SEQ ID NO: 6669 - DNA, 72 bp, Homo sapiens
tgtgtgaaagtctctgggtatgccagtggctggttggcccctttcgggccagtaggacacttgagccactgg

SEQ ID NO: 6670 - DNA, 51 bp, Homo sapiens
tgtgtcggccaaggaaaaactaactggggatggacgggaatgccctactgg

SEQ ID NO: 6671 - DNA, 33 bp, Homo sapiens
tgtgtcggtggttcacggtcttttgatatctgg

SEQ ID NO: 6672 - DNA, 72 bp, Homo sapiens
tgtgcgagacaagttttttatgacaacgatgactccgacgggttggggtactactacggtctggacgtctgg

SEQ ID NO: 6673 - DNA, 66 bp, Homo sapiens
tgtgcgagaggcctcaatcaacgttcctcgatttttggagtcgtccgccactgtttcgacccctgg

SEQ ID NO: 6674 - DNA, 57 bp, Homo sapiens
tgtgcgagaggggagggctatgccggtgttccgacacccaactggttcgacccctgg

SEQ ID NO: 6675 - DNA, 39 bp, Homo sapiens
tgttcgagagacgtggatgggggatattttgactactgg

SEQ ID NO: 6676 - DNA, 57 bp, Homo sapiens; identical to SEQ ID NO: 6674

SEQ ID NO: 6677 - DNA, 57 bp, Homo sapiens
tgtgcgaaagatggtccgacctccgcccactacgtacagtgggactttgactactgg

SEQ ID NO: 6678 - DNA, 39 bp, Homo sapiens
tgtgccagagggggggtatggttcgggtccctcaggtgg

SEQ ID NO: 6679 - DNA, 72 bp, Homo sapiens
tgtgcgaaagagtacatttgtagtggtggtacctgctactcgtttcgttcctactactacatggacgtctgg

SEQ ID NO: 6680 - DNA, 36 bp, Homo sapiens
tgtgcgaggttaagagatgcctacagtgactattgg

SEQ ID NO: 6681 - DNA, 48 bp, Homo sapiens
tgtgcaaaggacggactgcgatattttgggttttaccttgactcctgg

SEQ ID NO: 6682 - DNA, 51 bp, Homo sapiens
tgtgcaaaagattctagtccgggctacttcttttacggtatggacgtctgg

SEQ ID NO: 6683 - DNA, 51 bp, Homo sapiens
  modified_base (6)..(6): a, c, t, g, unknown or other
  modified_base (8)..(8): a, c, t, g, unknown or other
tgtgcnanaatggggtggcttttagtggcctcctactactttgaccactgg

SEQ ID NO: 6684 - DNA, 69 bp, Homo sapiens
tgtgcgagagtagcccgaatttgtactaatggtgcatgctatgagggggcatactactttgacaactgg

SEQ ID NO: 6685 - DNA, 75 bp, Homo sapiens
tgtgtaaaagataaaggatacagttctgggtacgatgatgtcgccggctactactggtacactatggacgtctgg

SEQ ID NO: 6686 - DNA, 57 bp, Homo sapiens
tgtgcgaaaactagacgtataactgcaaccaggtattactacggtatggacgtctgg

SEQ ID NO: 6687 - DNA, 54 bp, Homo sapiens
tgtgtgagacgtgagaggcccctccgttcagggagggctccttttgacacctgg

SEQ ID NO: 6688 - DNA, 57 bp, Homo sapiens
tgtgcgaaggggtcccgctatataacgatttttggagccaaccccccggactactgg

SEQ ID NO: 6689 - DNA, 60 bp, Homo sapiens
tgtgcgaggtcgcgacaacgtggatatagttcctacgacaagggggactttgactactgg

SEQ ID NO: 6690 - DNA, 63 bp, Homo sapiens
tgtgcgagagacttccataatacgatttttggagtggtcatcccgaggtacttcgatctctgg

SEQ ID NO: 6691 - DNA, 51 bp, Homo sapiens
tgtgtaaaacatagcgttggctacgctggttcggggagttttgactcctgg

SEQ ID NO: 6692 - DNA, 45 bp, Homo sapiens
tgtgcaaaagatcggagtggttatttctacgctttacacttctgg

SEQ ID NO: 6693 - DNA, 48 bp, Homo sapiens
tgtgcaagatgtcccgtagcaacacctggtagaggggttgactattgg

SEQ ID NO: 6694 - DNA, 51 bp, Homo sapiens
tgtgtaaaacataacctaggctattctggttcggggacttttgactactgg

SEQ ID NO: 6695 - DNA, 63 bp, Homo sapiens
gccgtctattactgtgcgagaggcgccacttacagaagctcgtcgggttattgggagtactgg

SEQ ID NO: 6696 - DNA, 48 bp, Homo sapiens
tgtgcgaaagatccttcttatggctcggggagttattcgcagtactgg

SEQ ID NO: 6697 - DNA, 48 bp, Homo sapiens
tgtgcgagagatcgtcatgactatggtgaagatccttttgatatctgg

SEQ ID NO: 6698 - DNA, 48 bp, Homo sapiens
tgtgcaaaagacggactgcgttattttgggttttatcttgactcctgg

SEQ ID NO: 6699 - DNA, 51 bp, Homo sapiens
tgtacgagagaagcggggctatggcccgagccgtactactttgactcctgg

SEQ ID NO: 6700 - DNA, 51 bp, Homo sapiens
tgtgcgagacaacccggtcgcgatagtagtggttattaccttgactcctgg

SEQ ID NO: 6701 - DNA, 66 bp, Homo sapiens
tgtgcgaaacgttcggcagactgcagcagtaccagctgctcgggaggcagttggttcgacccctgg

SEQ ID NO: 6702 - DNA, 45 bp, Homo sapiens
tgtgcgcgaaccatcgggatagtgacgacctactttgaatactgg

SEQ ID NO: 6703 - DNA, 54 bp, Homo sapiens
tgtgcgagagatcgaggggatgttcttgtagctcagggagccatcgggtactgg

SEQ ID NO: 6704 - DNA, 48 bp, Homo sapiens
tgtgcgagattacactatagcaccacctggcactatttcgacccctgg

SEQ ID NO: 6705 - DNA, 54 bp, Homo sapiens
tgtgcgagagattcggaagctacaacgacacgggggaggtggttcgacccctgg

SEQ ID NO: 6706 - DNA, 60 bp, Homo sapiens
tgcgcgaaggcgggggatagtgggagctcacactgctactactactacatggatgtctgg

SEQ ID NO: 6707 - DNA, 66 bp, Homo sapiens
tgtgcgaaaaatagaaattatcgtccttcgggggactttgcggaggggcactggctcgacccctgg

SEQ ID NO: 6708 - DNA, 51 bp, Homo sapiens
tgtacgaaggtcgatagcagtccctttttcgactatggtatggacgtctgg

SEQ ID NO: 6709 - DNA, 57 bp, Homo sapiens
tgtgcgagagatctccttaaacccccaaatatcgaccctacagtaaaaggtttgtgg

SEQ ID NO: 6710 - DNA, 66 bp, Homo sapiens
tgtactagagatatccggggcggatacagttatggttactttgttccttactactttgactactgg

SEQ ID NO: 6711 - DNA, 57 bp, Homo sapiens
tgtgcgagaatgggattcgttggttcctttacttcggggacttatatcgactactgg

SEQ ID NO: 6712 - DNA, 48 bp, Homo sapiens
tgtgcgagaatccacgattttcggagtggttttccccttgattactgg

SEQ ID NO: 6713 - DNA, 69 bp, Homo sapiens
tgtgcgagagatgattgtagtattaccacctgtcgcgttccaaatcaggaccatgcttttgatatctgg

SEQ ID NO: 6714 - DNA, 54 bp, Homo sapiens
tgtgcgagagcggcgtggcgggatggtaatgatggttattttcttgactactgg

SEQ ID NO: 6715 - DNA, 42 bp, Homo sapiens
tgtgcgaagcgaggtgactggctatggtactttgacgtctgg

SEQ ID NO: 6716 - DNA, 72 bp, Homo sapiens
tgtgcgagactcgtgcccgcagagccgtctggcccgggtaattacttctactacttcttcatggacgtctgg

SEQ ID NO: 6717 - DNA, 39 bp, Homo sapiens
tgtgcgagaggtactacggccaccgggatggacgtctgg

SEQ ID NO: 6718 - DNA, 42 bp, Homo sapiens
tgtgcgagagtagggagaaggagttggtacgtggactattgg

SEQ ID NO: 6719 - DNA, 27 bp, Homo sapiens
tgtacgagaggagaccctgactactgg

SEQ ID NO: 6720 - DNA, 57 bp, Homo sapiens
tgtgcgagaaaagtaaggggcagctcgcccgaccccctttactactttgactactgg

SEQ ID NO: 6721 - DNA, 45 bp, Homo sapiens
tgtacgcgtaatagtccaattaccgtttttggagttggcccctgg

SEQ ID NO: 6722 - DNA, 48 bp, Homo sapiens
tgtgcgagagggctcaattactattactatcacggtatggacgtctgg

SEQ ID NO: 6723 - DNA, 48 bp, Homo sapiens
tgtgcgagaggcctcaattactattactatcacggcatggacgtctgg

SEQ ID NO: 6724 - DNA, 54 bp, Homo sapiens
tgtgcgaaacttaggagaggtgtaatgcttattaagtactactttgacttctgg

SEQ ID NO: 6725 - DNA, 48 bp, Homo sapiens
tgtgcgagagatgccgggcgctttttggcctacggtatggacgtctgg

SEQ ID NO: 6726 - DNA, 42 bp, Homo sapiens
tgtgcgactgggtacggttttgtgggacctcttgcctactgg

SEQ ID NO: 6727 - DNA, 33 bp, Homo sapiens
tgttacgggggcgatactgaggtgcgatactgg

SEQ ID NO: 6728 - DNA, 54 bp, Homo sapiens
tgtgtgaggtgctttggatacagctctaataccccggcgtactttgattactgg

SEQ ID NO: 6729 - DNA, 54 bp, Homo sapiens
tgtgcgagagattttaggccttacgatcttttgactggtttgtttgactcctgg

SEQ ID NO: 6730 - DNA, 42 bp, Homo sapiens
tgtgcgaccttcagtcagggggggctacaaaatgactactgg

SEQ ID NO: 6731 - DNA, 39 bp, Homo sapiens
tgtgcgattgtatcccgttccttcgttatggacgtctgg

SEQ ID NO: 6732 - DNA, 54 bp, Homo sapiens
tgtgcgaaaacactaagaaagaggaatggttactctggccccattgactcctgg

SEQ ID NO: 6733 - DNA, 51 bp, Homo sapiens
tgtgcgagggatgacactggtatttccaagaaaaatgcttttgatatttgg

SEQ ID NO: 6734 - DNA, 63 bp, Homo sapiens
tgtgcgagagataacctgccttccctttacggtgactacgaccggaatgcttttgacatctgg

SEQ ID NO: 6735 - DNA, 45 bp, Homo sapiens
tgtgcgaaaggtcggaactactacgtggactactttgactactgg

SEQ ID NO: 6736 - DNA, 48 bp, Homo sapiens
tgtgcgagagggctcaattactattattatcatggaatggacgtctgg

SEQ ID NO: 6737 - DNA, 51 bp, Homo sapiens
tgtgcgagagactcccgtatagtgcctactaattactattatgacttctgg

SEQ ID NO: 6738 - DNA, 42 bp, Homo sapiens
tgtgcgagagatcccggtggcagctcttcctttgactactgg

SEQ ID NO: 6739 - DNA, 60 bp, Homo sapiens
tgtgcgagagttcgttgtggtggtctctgctattcctcggactggtacttcgatgtctgg

SEQ ID NO: 6740 - DNA, 48 bp, Homo sapiens
tgtgcgagagggctcaattactacttttatcacggtatggacctctgg

SEQ ID NO: 6741 - DNA, 48 bp, Homo sapiens
tgtgcgaaagggctgaattattattattaccacggaatggacgtttgg

SEQ ID NO: 6742 - DNA, 66 bp, Homo sapiens
tgtgcgaaagacactgccacggtgactacctcactttatttctattaccacggaatggacgtctgg

SEQ ID NO: 6743 - DNA, 54 bp, Homo sapiens
tgtgcgaaatctcaaggccccttttacagtgactacgtctactttgagtcctgg

SEQ ID NO: 6744 - DNA, 60 bp, Homo sapiens
tgtgcgagagaggggagttatggtgacacctatcactcctattacggtatggacgtctgg

SEQ ID NO: 6745 - DNA, 48 bp, Homo sapiens
tgcaccgctgatctcagcacctcgtccgggcactactttgactactgg

SEQ ID NO: 6746 - DNA, 42 bp, Homo sapiens
tgtgcgaggcacagttatgctctccccccccgtgactactgg

SEQ ID NO: 6747 - DNA, 45 bp, Homo sapiens
tgtgcgagagggggggggtggctacaatcggactttgacatctgg

SEQ ID NO: 6748 - DNA, 66 bp, Homo sapiens
tgtgcgagtagcagtggctggcccagcgaccgctatttccaccactactccgggttggacgtctgg

SEQ ID NO: 6749 - DNA, 33 bp, Homo sapiens
tgtgcgggacatacaagcacgactaacttttgg

SEQ ID NO: 6750 - DNA, 45 bp, Homo sapiens
tgtgcgaggggggattgtactagtaccagctgttatgtccactgg

SEQ ID NO: 6751 - DNA, 66 bp, Homo sapiens
tgtgtaagagagggtcgtgaatacggcgaccgcttctcggtccccaactggtatttcgatctctgg

SEQ ID NO: 6752 - DNA, 60 bp, Homo sapiens
tgtgcgagacacccctcgtatctagccgtggctgacggaagggatgcttttgatatctgg

SEQ ID NO: 6753 - DNA, 63 bp, Homo sapiens
tgtgcgagacagccgcctattacgatttttggacttctcaggccggggtggttcggctcctgg

SEQ ID NO: 6754 - DNA, 60 bp, Homo sapiens
tgtgcgagagaggggagctatggtgacacctatcactcctactacgctatggacgtctgg

SEQ ID NO: 6755 - DNA, 66 bp, Homo sapiens
  modified_base (63)..(63): a, c, t, g, unknown or other
tgtgcaagagagggtcgtgagtacggtgaccgcttctcggtcccctactggtacttcgatctntgg

SEQ ID NO: 6756 - DNA, 45 bp, Homo sapiens
tgtgcgagaggcgtcttttcccccgcatattattttgagtactgg

SEQ ID NO: 6757 - DNA, 45 bp, Homo sapiens
tgtgcgaaaatcgcggtcagtgggcaatggtacttcgatctctgg

SEQ ID NO: 6758 - DNA, 39 bp, Homo sapiens
tgtgtagtctttattacgccaacgataaattatacctgg

SEQ ID NO: 6759 - DNA, 63 bp, Homo sapiens
tgtgcgaggctcgggggcactggcttgaacgggggagacttccaatacggtgtggacatctgg

SEQ ID NO: 6760 - DNA, 72 bp, Homo sapiens
tgttcgagacttaatccttcgaggagaccaccacctggggtgccacactactactatggtatggacgtctgg

SEQ ID NO: 6761 - DNA, 54 bp, Homo sapiens
tgcacgagttgttggcccatcctgaatcactattcccctaggccatcctcctgg

SEQ ID NO: 6762 - DNA, 48 bp, Homo sapiens
tgtgcgagcgcgttgcggtatagttttgtttacggtatggacgtctgg

SEQ ID NO: 6763 - DNA, 45 bp, Homo sapiens
tgtgtgaaagatgcctataacagtggctggcactttgactactgg

SEQ ID NO: 6764 - DNA, 33 bp, Homo sapiens
tgtaccaaacagactggagattttgactcctgg

SEQ ID NO: 6765 - DNA, 54 bp, Homo sapiens
tgtgtcagttcatattgtagaggaaacaactgctatggagccccaaactactgg

SEQ ID NO: 6766 - DNA, 60 bp, Homo sapiens
tgtgcgagagaggggagctatggtgacacctatcacttctactacgctatggacgtctgg

SEQ ID NO: 6767 - DNA, 30 bp, Homo sapiens
tgtgtaacccaacagtctttcgatctctgg

SEQ ID NO: 6768 - DNA, 42 bp, Homo sapiens
tgtgccaaaatcctgcctggaatttatgcctttgatctttgg

SEQ ID NO: 6769 - DNA, 54 bp, Homo sapiens
tgtgcgagaacgggtggatacagctttgattactcggactactttgacttctgg

SEQ ID NO: 6770 - DNA, 48 bp, Homo sapiens
tgtgccataccgccggtcccttactactactactactcggacgtctgg

SEQ ID NO: 6771 - DNA, 63 bp, Homo sapiens
tgtgcgagacaaagacgtgtttcgatttttggattacttctgccaggggagtttgacacctgg

SEQ ID NO: 6772 - DNA, 69 bp, Homo sapiens
tgtgcgagacataatgaccattattgtagtagtaccagctgctatcccgtcgggtacttcgatctctgg

SEQ ID NO: 6773 - DNA, 66 bp, Homo sapiens
tgtgcgagagccctctattactatgatagtagtggttttccagtcctctactactttgactactgg

SEQ ID NO: 6774 - DNA, 48 bp, Homo sapiens
tgtgcgagacttccacggggtgatacgctctactactttgactactgg

SEQ ID NO: 6775 - DNA, 45 bp, Homo sapiens
tgtgcgaaaggagccaactggggatcttggttccttgactcctgg

SEQ ID NO: 6776 - DNA, 69 bp, Homo sapiens
tgtgcgggccgcaggggatacgatttttggagtggttattataactactactacggtatggacgtctgg

SEQ ID NO: 6777 - DNA, 60 bp, Homo sapiens
tgtgcgaaagaggggtgggcatattgtggtggtgactgctattcatactttgactactgg

SEQ ID NO: 6778 - DNA, 57 bp, Homo sapiens
tgtgcgagaggcaagaggggtgggaaccccgatttttcgcagcggttcgacccctgg

SEQ ID NO: 6779 - DNA, 72 bp, Homo sapiens
tgtgctagaggggggcatacagctatggttacgaccccgtatttctactactactacggtatggacgtctgg

SEQ ID NO: 6780 - DNA, 60 bp, Homo sapiens
tgtgcgagagctcctgacgatttttggagtggttattgggggtactactttgactactgg

SEQ ID NO: 6781 - DNA, 60 bp, Homo sapiens
tgtgcaaactcggagtgggagctactcggtccttctacttggtggtacttcgatctctgg

SEQ ID NO: 6782 - DNA, 36 bp, Homo sapiens
tgtgcgagagaagaaggtgggagctactttgactgg

SEQ ID NO: 6783 - DNA, 60 bp, Homo sapiens
tgtgggagacatgccgtaacgacatggtataactggaactatcacccatttgactactgg

SEQ ID NO: 6784 - DNA, 54 bp, Homo sapiens
tgtgcgagacatcccgtcaactacggtgactacgtagagtggttcgacccctgg

SEQ ID NO: 6785 - DNA, 45 bp, Homo sapiens; identical to SEQ ID NO: 1952

SEQ ID NO: 6786 - DNA, 66 bp, Homo sapiens
tgtgcgaaagttggctggtccctgcagtggcttaatttgggctactctaacgacatggacgtctgg

SEQ ID NO: 6787 - DNA, 66 bp, Homo sapiens
tgtgcgagatcacacacttcggggagttatttgtggcgggatctcccgtactggttcgacccctgg

SEQ ID NO: 6788 - DNA, 81 bp, Homo sapiens
tgtgcgagagaagggcataggcatagcagcaggtggcgagacacgggctattactactactactactacatggacgtctgg

SEQ ID NO: 6789 - DNA, 60 bp, Homo sapiens
tgtgcgagagattctaatgaggcagctcgagggtcggagtactggtacttcgatctctgg

SEQ ID NO: 6790 - DNA, 66 bp, Homo sapiens
  modified_base (62)..(62): a, c, t, g, unknown or other
tgtgcgagacaagattactatgatagtagtggttactccacggagtattacggtatggacgnctgg

SEQ ID NO: 6791 - DNA, 63 bp, Homo sapiens
tgtgcgaaagatcagtccggttttgtactaatggtgtatgctatacattcgcctgggtactgg

SEQ ID NO: 6792 - DNA, 24 bp, Homo sapiens
tgtgcaaaagatggcggtgacttg

SEQ ID NO: 6793 - DNA, 54 bp, Homo sapiens
tgtgcgagagagggtagcagcagctgggagttttacaactggttcgacccctgg

SEQ ID NO: 6794 - DNA, 45 bp, Homo sapiens
tgtgcgaaattgatggtggacctcgactattatatggacgtctgg

SEQ ID NO: 6795 - DNA, 57 bp, Homo sapiens
tgtgcgagagaccccacgccatacagtaacgctcagctatgttggttcgacccctgg

SEQ ID NO: 6796 - DNA, 51 bp, Homo sapiens
tgtgcaaaagacccgttacgatacagctctttatacggtatggacgtctgg

SEQ ID NO: 6797 - DNA, 60 bp, Homo sapiens
tgtgcgagaggacaggattacgatattttgactcgtagttcatactacatggacgtctgg

SEQ ID NO: 6798 - DNA, 51 bp, Homo sapiens
tgtgcgagagaaagccatgactacagtaactatcgattctttgactcctgg

SEQ ID NO: 6799 - DNA, 78 bp, Homo sapiens
tgtgcgagccccctaggatattgtagtagtaccagctgctatagaacttactactactactacggtatggacgtctgg

SEQ ID NO: 6800 - DNA, 57 bp, Homo sapiens
tgtgcgagactgacggttccctcaattagatcgtggtcgtccaggttcgacccctgg

SEQ ID NO: 6801 - DNA, 30 bp, Homo sapiens
tgtgcaagagacctgtccatggacgtctgg

SEQ ID NO: 6802 - DNA, 39 bp, Homo sapiens
tgttcacagggggacggtacggtggggtttcactactgg

SEQ ID NO: 6803 - DNA, 42 bp, Homo sapiens
tgtgcgagaatccactacggtgactacttcgttgactcctgg

SEQ ID NO: 6804 - DNA, 33 bp, Homo sapiens
tgtaccacaggtactacgtactttgactactgg

SEQ ID NO: 6805 - DNA, 60 bp, Homo sapiens
tgtgcgagacatgccgtaacgacatggtataactggaactatcacccatttgactactgg

SEQ ID NO: 6806 - DNA, 48 bp, Homo sapiens
tgtgcgagagatggaggggatgaattcgctgaatacttccagcactgg

SEQ ID NO: 6807 - DNA, 63 bp, Homo sapiens
tgtgcgagtcaagtgggactacgcgtagttatttcttactactactactacatggacgtctgg

SEQ ID NO: 6808 - DNA, 54 bp, Homo sapiens
tgtgcgagacatccggtcgagtatagcagcttagctggagcttttgatatctgg

SEQ ID NO: 6809 - DNA, 57 bp, Homo sapiens
tgtgcgagacaaggcgctggggatcttccctacaagtactacttcatggacgtctgg

SEQ ID NO: 6810 - DNA, 51 bp, Homo sapiens
tgtgcgagacatccagtagagtatagtagctcgtccggctttgactactgg

SEQ ID NO: 6811 - DNA, 54 bp, Homo sapiens
tgtgcgagcctgtattacgatttttggagtggttatttcggtggggactactgg

SEQ ID NO: 6812 - DNA, 57 bp, Homo sapiens
tgtgcgagatcgacgccgtataactggaactccccgtcccccgcctttgactactgg

SEQ ID NO: 6813 - DNA, 39 bp, Homo sapiens
tgtgcgagagatagggaaaactggtacttcgatctctgg

SEQ ID NO: 6814 - DNA, 51 bp, Homo sapiens
tgtgcgagagatggggatagcagtggctggtacgccagatttgactactgg

SEQ ID NO: 6815 - DNA, 48 bp, Homo sapiens
tgtgcgagaggtctccgggaccccttatcgtggtacttggacgtctgg

SEQ ID NO: 6816 - DNA, 57 bp, Homo sapiens
tgtgcgagagatcccgaccaactatttgtacaggacccatactactttgactactgg

SEQ ID NO: 6817 - DNA, 69 bp, Homo sapiens
tgtgcgagaggaagtctggacgatttttggagtggttggatcgaagattactactacatggacgtctgg

SEQ ID NO: 6818 - DNA, 69 bp, Homo sapiens; identical to SEQ ID NO: 6817

SEQ ID NO: 6819 - DNA, 57 bp, Homo sapiens; identical to SEQ ID NO: 6816

SEQ ID NO: 6820 - DNA, 57 bp, Homo sapiens
tgtgcaaaagatccgaccccgtatagtgggagatacttcacctggttcgacccctgg

SEQ ID NO: 6821 - DNA, 57 bp, Homo sapiens
tgtgcgagagatccggggggctttggagtggtcgccccatactactttgactactgg

SEQ ID NO: 6822 - DNA, 54 bp, Homo sapiens
tgtgcgagacaccccgtcaactacggtgactacgtagagtggttcgacccctgg

SEQ ID NO: 6823 - DNA, 45 bp, Homo sapiens; identical to SEQ ID NO: 1952

SEQ ID NO: 6824 - DNA, 72 bp, Homo sapiens
tgtgcgagagtagggactgagcgtattacgatttttggagtggttattagtgcggcggctatggacgtctgg

SEQ ID NO: 6825 - DNA, 63 bp, Homo sapiens
tgtgcgagatcggtctacgacacgaaaccaatgacttactactactactacatggacgtctgg

SEQ ID NO: 6826 - DNA, 54 bp, Homo sapiens
tgtgcgagaggcgtattactatggtttggggagaacgaaaacaatgactactgg

SEQ ID NO: 6827 - DNA, 60 bp, Homo sapiens
tgtgcgagacggggtggggcgtgcggtagtggtggtagctgcttgccttttgactactgg

SEQ ID NO: 6828 - DNA, 51 bp, Homo sapiens
tgtgcgagacatggtgtagagtatagcacctcgtcgtgctttgactactgg

SEQ ID NO: 6829 - DNA, 45 bp, Homo sapiens
tgtgccagaggacggagtggcagctcgtgggactttggctactgg

SEQ ID NO: 6830 - DNA, 57 bp, Homo sapiens
tgtgcgagaggcaagaggggtgggaaccccgatttttcgcagaggttcgacccgtgg

SEQ ID NO: 6831 - DNA, 57 bp, Homo sapiens; identical to SEQ ID NO: 6816

SEQ ID NO: 6832 - DNA, 33 bp, Homo sapiens
tgtgcgagacaacgatcggagcatgactactgg

SEQ ID NO: 6833 - DNA, 48 bp, Homo sapiens
tgtgcgagaccttcaagggagggatacctggattattttgatgtctgg

SEQ ID NO: 6834 - DNA, 72 bp, Homo sapiens
tgtgcgacctcgaccttaaatatagtggctacgattggtccccattactactactacggtatggacgtctgg

SEQ ID NO: 6835 - DNA, 57 bp, Homo sapiens; identical to SEQ ID NO: 6816

SEQ ID NO: 6836 - DNA, 48 bp, Homo sapiens
tgtgcgagacatctacgcggtgatttcgtcggacagtttgactactgg

SEQ ID NO: 6837 - DNA, 69 bp, Homo sapiens; identical to SEQ ID NO: 6817

SEQ ID NO: 6838 - DNA, 60 bp, Homo sapiens
tgtgcggggaaaacttacgatttttggagtggttatcctataaaggttgttgactactgg

SEQ ID NO: 6839 - DNA, 60 bp, Homo sapiens; identical to SEQ ID NO: 6780

SEQ ID NO: 6840 - DNA, 63 bp, Homo sapiens
tgtgcgagactgaagggggggtgggagctacttatctactactactactacatggacgtctgg

SEQ ID NO: 6841 - DNA, 51 bp, Homo sapiens
tgtgcgagacggggggaaggctatagcagctcgtccagctttgactactgg

SEQ ID NO: 6842 - DNA, 45 bp, Homo sapiens
tgtgcgaaagattcggaaggctacgagtactactttgactactgg

SEQ ID NO: 6843 - DNA, 45 bp, Homo sapiens
tgtgggagagtggccggtgggacctactcttggtttgacttctgg

SEQ ID NO: 6844 - DNA, 57 bp, Homo sapiens
tgtgcgagtctacgggtggatacagctatggttacgtggggggatcaagactactgg

SEQ ID NO: 6845 - DNA, 57 bp, Homo sapiens; identical to SEQ ID NO: 6816

SEQ ID NO: 6846 - DNA, 84 bp, Homo sapiens
tgtgcgagaattggtgttaagggggggtcctacgatttttggagtggttattatcccaacccaggtggatactttgactactgg

SEQ ID NO: 6847 - DNA, 10 bp, Homo sapiens
tgtgcgagag

SEQ ID NO: 6848 - DNA, 10 bp, Homo sapiens
tgtgcaaaag

SEQ ID NO: 6849 - DNA, 10 bp, Homo sapiens
tgtgcgagag

SEQ ID NO: 6850 - DNA, 11 bp, Homo sapiens
tgtgtgagagg

SEQ ID NO: 6851 - DNA, 11 bp, Homo sapiens
tgtgggaaaga

SEQ ID NO: 6852 - DNA, 11 bp, Homo sapiens
tgtgcgagaga

SEQ ID NO: 6853 - DNA, 11 bp, Homo sapiens
tgtttgagaga

SEQ ID NO: 6854 - DNA, 11 bp, Homo sapiens
tgtgcgagagg

SEQ ID NO: 6855 - DNA, 11 bp, Homo sapiens
tgtgcgagaga

SEQ ID NO: 6856 - DNA, 10 bp, Homo sapiens
tgtgcgagag

SEQ ID NO: 6857 - DNA, 10 bp, Homo sapiens
tgtgcgagag

SEQ ID NO: 6858 - DNA, 10 bp, Homo sapiens
tgtgtgaaag

SEQ ID NO: 6859 - DNA, 11 bp, Homo sapiens
tgtgcgagagg

SEQ ID NO: 6860 - DNA, 10 bp, Homo sapiens
tgtgcgagag

SEQ ID NO: 6861 - DNA, 11 bp, Homo sapiens
tgttcgagaga

SEQ ID NO: 6862 - DNA, 10 bp, Homo sapiens
tgtgcgagag

SEQ ID NO: 6863 - DNA, 11 bp, Homo sapiens
tgtgcgaaaga

SEQ ID NO: 6864 - DNA, 10 bp, Homo sapiens
tgtgccagag

SEQ ID NO: 6865 - DNA, 11 bp, Homo sapiens
tgtgcgaaaga

SEQ ID NO: 6866 - DNA, 11 bp, Homo sapiens
tgtgcaaagga

SEQ ID NO: 6867 - DNA, 10 bp, Homo sapiens
tgtgcgagag

SEQ ID NO: 6868 - DNA, 13 bp, Homo sapiens
tgtgtaaaagata

SEQ ID NO: 6869 - DNA, 10 bp, Homo sapiens
tgtgtgagac

SEQ ID NO: 6870 - DNA, 11 bp, Homo sapiens
tgtgcgagaga

SEQ ID NO: 6871 - DNA, 13 bp, Homo sapiens
tgtgtaaaacata

SEQ ID NO: 6872 - DNA, 12 bp, Homo sapiens
tgtgcaaaagat

SEQ ID NO: 6873 - DNA, 13 bp, Homo sapiens
tgtgtaaaacata

SEQ ID NO: 6874 - DNA, 11 bp, Homo sapiens
tgtgcgaaaga

SEQ ID NO: 6875 - DNA, 11 bp, Homo sapiens
tgtgcgagaga

SEQ ID NO: 6876 - DNA, 11 bp, Homo sapiens
tgtgcaaaaga

SEQ ID NO: 6877 - DNA, 11 bp, Homo sapiens
tgtacgagaga

SEQ ID NO: 6878 - DNA, 11 bp, Homo sapiens
tgtgcgagaga

SEQ ID NO: 6879 - DNA, 11 bp, Homo sapiens
tgtgcgagaga

SEQ ID NO: 6880 - DNA, 11 bp, Homo sapiens
tgtactagaga

SEQ ID NO: 6881 - DNA, 11 bp, Homo sapiens
tgtgcgagaga

SEQ ID NO: 6882 - DNA, 10 bp, Homo sapiens
tgtgcgagag

SEQ ID NO: 6883 - DNA, 10 bp, Homo sapiens
tgtgcgagac

SEQ ID NO: 6884 - DNA, 10 bp, Homo sapiens
tgtgcgagag

SEQ ID NO: 6885 - DNA, 10 bp, Homo sapiens
tgtgcgagag

SEQ ID NO: 6886 - DNA, 10 bp, Homo sapiens
tgtacgagag

SEQ ID NO: 6887 - DNA, 11 bp, Homo sapiens
tgtgcgagaga

SEQ ID NO: 6888 - DNA, 11 bp, Homo sapiens
tgtgcgagaga

SEQ ID NO: 6889 - DNA, 11 bp, Homo sapiens
tgtgcgaggga

SEQ ID NO: 6890 - DNA, 11 bp, Homo sapiens
tgtgcgagaga

SEQ ID NO: 6891 - DNA, 10 bp, Homo sapiens
tgtgcgaaag

SEQ ID NO: 6892 - DNA, 10 bp, Homo sapiens
tgtgcgagag

SEQ ID NO: 6893 - DNA, 11 bp, Homo sapiens
tgtgcgagaga

SEQ ID NO: 6894 - DNA, 11 bp, Homo sapiens
tgtgcgagaga

SEQ ID NO: 6895 - DNA, 10 bp, Homo sapiens
tgtgcgagag

SEQ ID NO: 6896 - DNA, 10 bp, Homo sapiens
tgtgcgagag

SEQ ID NO: 6897 - DNA, 10 bp, Homo sapiens
tgtgcgaaag

SEQ ID NO: 6898 - DNA, 11 bp, Homo sapiens
tgtgcgaaaga

SEQ ID NO: 6899 - DNA, 11 bp, Homo sapiens
tgtgcgagaga

SEQ ID NO: 6900 - DNA, 10 bp, Homo sapiens
tgtgcgagag

SEQ ID NO: 6901 - DNA, 11 bp, Homo sapiens
tgtgcgggaca

SEQ ID NO: 6902 - DNA, 11 bp, Homo sapiens
tgtgtaagaga

SEQ ID NO: 6903 - DNA, 11 bp, Homo sapiens
tgtgcgagaca

SEQ ID NO: 6904 - DNA, 11 bp, Homo sapiens
tgtgcgagaga

SEQ ID NO: 6905 - DNA, 11 bp, Homo sapiens
tgtgcaagaga

SEQ ID NO: 6906 - DNA, 10 bp, Homo sapiens
tgtgcgagag

SEQ ID NO: 6907 - DNA, 11 bp, Homo sapiens
tgtgtgaaaga

SEQ ID NO: 6908 - DNA, 11 bp, Homo sapiens
tgtgcgagaga

SEQ ID NO: 6909 - DNA, 11 bp, Homo sapiens
tgtgcgagaca

SEQ ID NO: 6910 - DNA, 11 bp, Homo sapiens
tgtgcgagaca

SEQ ID NO: 6911 - DNA, 10 bp, Homo sapiens
tgtgcgagag

SEQ ID NO: 6912 - DNA, 10 bp, Homo sapiens
tgtgcgagac

SEQ ID NO: 6913 - DNA, 10 bp, Homo sapiens
tgtgcgaaag

SEQ ID NO: 6914 - DNA, 10 bp, Homo sapiens
tgtgcgagag

SEQ ID NO: 6915 - DNA, 10 bp, Homo sapiens
tgtgctagag

SEQ ID NO: 6916 - DNA, 10 bp, Homo sapiens
tgtgcgagag

SEQ ID NO: 6917 - DNA, 11 bp, Homo sapiens
tgtgcgagaga

SEQ ID NO: 6918 - DNA, 11 bp, Homo sapiens
tgtgggagaca

SEQ ID NO: 6919 - DNA, 11 bp, Homo sapiens
tgtgcgagaca

SEQ ID NO: 6920 - DNA, 11 bp, Homo sapiens
tgtgcgagaga

SEQ ID NO: 6921 - DNA, 10 bp, Homo sapiens
tgtgcgaaag

SEQ ID NO: 6922 - DNA, 11 bp, Homo sapiens
tgtgcgagaga

SEQ ID NO: 6923 - DNA, 11 bp, Homo sapiens
tgtgcgagaga

SEQ ID NO: 6924 - DNA, 11 bp, Homo sapiens
tgtgcgagaga

SEQ ID NO: 6925 - DNA, 11 bp, Homo sapiens
tgtgcgagaga

SEQ ID NO: 6926 - DNA, 10 bp, Homo sapiens
tgtgcgagag

SEQ ID NO: 6927 - DNA, 10 bp, Homo sapiens
tgtgcgagac

SEQ ID NO: 6928 - DNA, 11 bp, Homo sapiens
tgtgcaagaga

SEQ ID NO: 6929 - DNA, 10 bp, Homo sapiens
tgtaccacag

SEQ ID NO: 6930 - DNA, 11 bp, Homo sapiens
tgtgcgagaca

SEQ ID NO: 6931 - DNA, 11 bp, Homo sapiens
tgtgcgagaga

SEQ ID NO: 6932 - DNA, 11 bp, Homo sapiens
tgtgcgagaca

SEQ ID NO: 6933 - DNA, 11 bp, Homo sapiens
tgtgcgagaca

SEQ ID NO: 6934 - DNA, 11 bp, Homo sapiens
tgtgcgagaca

SEQ ID NO: 6935 - DNA, 11 bp, Homo sapiens
tgtgcgagaga

SEQ ID NO: 6936 - DNA, 11 bp, Homo sapiens
tgtgcgagaga

SEQ ID NO: 6937 - DNA, 10 bp, Homo sapiens
tgtgcgagag

SEQ ID NO: 6938 - DNA, 10 bp, Homo sapiens
tgtgcgagag

SEQ ID NO: 6939 - DNA, 10 bp, Homo sapiens
tgtgcgagag

SEQ ID NO: 6940 - DNA, 11 bp, Homo sapiens
tgtgcgagaga

SEQ ID NO: 6941 - DNA, 11 bp, Homo sapiens
tgtgcgagaca

SEQ ID NO: 6942 - DNA, 11 bp, Homo sapiens
tgtgcgagaga

SEQ ID NO: 6943 - DNA, 10 bp, Homo sapiens
tgtgcgagag

SEQ ID NO: 6944 - DNA, 10 bp, Homo sapiens
tgtgcgagag

SEQ ID NO: 6945 - DNA, 11 bp, Homo sapiens
tgtgcgagaca

SEQ ID NO: 6946 - DNA, 10 bp, Homo sapiens
tgtgccagag

SEQ ID NO: 6947 - DNA, 10 bp, Homo sapiens
tgtgcgagag

SEQ ID NO: 6948 - DNA, 11 bp, Homo sapiens
tgtgcgagaca

SEQ ID NO: 6949 - DNA, 10 bp, Homo sapiens
tgtgcgagag

SEQ ID NO: 6950 - DNA, 10 bp, Homo sapiens
tgtgcgagag

SEQ ID NO: 6951 - DNA, 10 bp, Homo sapiens
tgtgcgagac

SEQ ID NO: 6952 - DNA, 10 bp, Homo sapiens
tgtgcgagac

SEQ ID NO: 6953 - DNA, 11 bp, Homo sapiens
tgtgcgaaaga

SEQ ID NO: 6954 - DNA, 10 bp, Homo sapiens
tgtgggagag

SEQ ID NO: 6955 - DNA, 19 bp, Homo sapiens
ggatgtattactatgagtc

SEQ ID NO: 6956 - DNA, 20 bp, Homo sapiens
cacagtgggtgatgttgttc

SEQ ID NO: 6957 - DNA, 26 bp, Homo sapiens
cgaggggaacaatcggtcctttttct

SEQ ID NO: 6958 - DNA, 25 bp, Homo sapiens
gagactctcctaatatggaatacgc

SEQ ID NO: 6959 - DNA, 30 bp, Homo sapiens
caacgtggatacaactatggtgcgaagatg

SEQ ID NO: 6960 - DNA, 24 bp, Homo sapiens
cgctccgtggtggtctcacttgtc

SEQ ID NO: 6961 - DNA, 38 bp, Homo sapiens
cctcaatcaacgtgcttccatttttggagacgtccggt

SEQ ID NO: 6962 - DNA, 29 bp, Homo sapiens
gcaaatataatcacagctggttcgtccac

SEQ ID NO: 6963 - DNA, 42 bp, Homo sapiens
gatattacgatttttggagtggccaggtggacgtttgattct

SEQ ID NO: 6964 - DNA, 56 bp, Homo sapiens
tatcaagtggacttattttgatagtagtacttattatgacggtgatggtttcgact

SEQ ID NO: 6965 - DNA, 22 bp, Homo sapiens
cgaggggaacaatcggtccttt

SEQ ID NO: 6966 - DNA, 39 bp, Homo sapiens
gggaccatggttcgggatgtctttatacgccgcccgcag

SEQ ID NO: 6967 - DNA, 16 bp, Homo sapiens
tttcgaccgtggtgca

SEQ ID NO: 6968 - DNA, 30 bp, Homo sapiens
gccccgagagggtggcggtggtaatgcctt

SEQ ID NO: 6969 - DNA, 43 bp, Homo sapiens
cttggggaaccgcattacgatttatggagtgcttgttaccaga

SEQ ID NO: 6970 - DNA, 37 bp, Homo sapiens
agcgatgattgtactaatggtgtatgctatacccggc

SEQ ID NO: 6971 - DNA, 22 bp, Homo sapiens
catgagacctccccggggggag

SEQ ID NO: 6972 - DNA, 38 bp, Homo sapiens
cctgaagcacaacgattgttttagtttcggctgtccac

SEQ ID NO: 6973 - DNA, 57 bp, Homo sapiens
cagccctattgtagtagtaccagctgccccacgagaattatactactcccctggggg

SEQ ID NO: 6974 - DNA, 38 bp, Homo sapiens
cctcaagcacgacgattgttatagtaccgcctgtccac

SEQ ID NO: 6975 - DNA, 46 bp, Homo sapiens
cctgacagatcaacatgacgggtgtaccagtgccagctgccataaa

SEQ ID NO: 6976 - DNA, 28 bp, Homo sapiens
tatgtggggaatcgaggaccaacctcct

SEQ ID NO: 6977 - DNA, 28 bp, Homo sapiens
tcggaatgagtgatggttattactacgt

SEQ ID NO: 6978 - DNA, 24 bp, Homo sapiens
caggcgattgggactataatcccc

SEQ ID NO: 6979 - DNA, 24 bp, Homo sapiens
gataaggcggggaactagcggtta

SEQ ID NO: 6980 - DNA, 30 bp, Homo sapiens
cacggggacccgtggtcctaggtgaagccc

SEQ ID NO: 6981 - DNA, 39 bp, Homo sapiens
actaatggtctaacaggaccagcctatgtcaatgcagag

SEQ ID NO: 6982 - DNA, 56 bp, Homo sapiens
tctctgggtatgccagtggctggttggcccctttcgggccagtaggacacttgagc

SEQ ID NO: 6983 - DNA, 40 bp, Homo sapiens
tcggccaaggaaaaactaactggggatggacgggaatgcc

SEQ ID NO: 6984 - DNA, 15 bp, Homo sapiens
tcggtggttcacggt

SEQ ID NO: 6985 - DNA, 39 bp, Homo sapiens
caagttttttatgacaacgatgactccgacgggttgggg

SEQ ID NO: 6986 - DNA, 38 bp, Homo sapiens
cctcaatcaacgttcctcgatttttggagtcgtccgcc

SEQ ID NO: 6987 - DNA, 28 bp, Homo sapiens
gggagggctatgccggtgttccgacacc

SEQ ID NO: 6988 - DNA, 13 bp, Homo sapiens
cgtggatggggga

SEQ ID NO: 6989 - DNA, 28 bp, Homo sapiens
gggagggctatgccggtgttccgacacc

SEQ ID NO: 6990 - DNA, 32 bp, Homo sapiens
tggtccgacctccgcccactacgtacagtggg

SEQ ID NO: 6991 - DNA, 26 bp, Homo sapiens
ggggggtatggttcgggtccctcagg

SEQ ID NO: 6992 - DNA, 39 bp, Homo sapiens
gtacatttgtagtggtggtacctgctactcgtttcgttc

SEQ ID NO: 6993 - DNA, 18 bp, Homo sapiens
gttaagagatgcctacag

SEQ ID NO: 6994 - DNA, 22 bp, Homo sapiens
cggactgcgatattttgggttt

SEQ ID NO: 6995 - DNA, 24 bp, Homo sapiens
gattctagtccgggctacttcttt

SEQ ID NO: 6996 - DNA, 29 bp, Homo sapiens
  modified_base (1)..(1): a, c, t, g, unknown or other
  modified_base (3)..(3): a, c, t, g, unknown or other
nanaatggggtggcttttagtggcctcct

SEQ ID NO: 6997 - DNA, 42 bp, Homo sapiens
tagcccgaatttgtactaatggtgcatgctatgagggggcat

SEQ ID NO: 6998 - DNA, 44 bp, Homo sapiens
aaggatacagttctgggtacgatgatgtcgccggctactactgg

SEQ ID NO: 6999 - DNA, 26 bp, Homo sapiens
aaactagacgtataactgcaaccagg

SEQ ID NO: 7000 - DNA, 30 bp, Homo sapiens
gtgagaggcccctccgttcagggagggctc

SEQ ID NO: 7001 - DNA, 41 bp, Homo sapiens
aggggtcccgctatataacgatttttggagccaaccccccg

SEQ ID NO: 7002 - DNA, 38 bp, Homo sapiens
gtcgcgacaacgtggatatagttcctacgacaaggggg

SEQ ID NO: 7003 - DNA, 35 bp, Homo sapiens
cttccataatacgatttttggagtggtcatcccga

SEQ ID NO: 7004 - DNA, 26 bp, Homo sapiens
gcgttggctacgctggttcggggagt

SEQ ID NO: 7005 - DNA, 25 bp, Homo sapiens
cggagtggttatttctacgctttac

SEQ ID NO: 7006 - DNA, 28 bp, Homo sapiens
tgtcccgtagcaacacctggtagagggg

SEQ ID NO: 7007 - DNA, 26 bp, Homo sapiens
acctaggctattctggttcggggact

SEQ ID NO: 7008 - DNA, 53 bp, Homo sapiens
ccgtctattactgtgcgagaggcgccacttacagaagctcgtcgggttattgg

SEQ ID NO: 7009 - DNA, 31 bp, Homo sapiens
tccttcttatggctcggggagttattcgcag

SEQ ID NO: 7010 - DNA, 19 bp, Homo sapiens
tcgtcatgactatggtgaa

SEQ ID NO: 7011 - DNA, 26 bp, Homo sapiens
cggactgcgttattttgggttttatc

SEQ ID NO: 7012 - DNA, 23 bp, Homo sapiens
agcggggctatggcccgagccgt

SEQ ID NO: 7013 - DNA, 27 bp, Homo sapiens
caacccggtcgcgatagtagtggttat

SEQ ID NO: 7014 - DNA, 42 bp, Homo sapiens
cgttcggcagactgcagcagtaccagctgctcgggaggcagt

SEQ ID NO: 7015 - DNA, 20 bp, Homo sapiens
accatcgggatagtgacgac

SEQ ID NO: 7016 - DNA, 37 bp, Homo sapiens
tcgaggggatgttcttgtagctcagggagccatcggg

SEQ ID NO: 7017 - DNA, 22 bp, Homo sapiens
ttacactatagcaccacctggc

SEQ ID NO: 7018 - DNA, 28 bp, Homo sapiens
ttcggaagctacaacgacacgggggagg

SEQ ID NO: 7019 - DNA, 23 bp, Homo sapiens
ggcgggggatagtgggagctcac

SEQ ID NO: 7020 - DNA, 40 bp, Homo sapiens
aatagaaattatcgtccttcgggggactttgcggaggggc

SEQ ID NO: 7021 - DNA, 23 bp, Homo sapiens
ggtcgatagcagtccctttttcg

SEQ ID NO: 7022 - DNA, 45 bp, Homo sapiens
gatctccttaaacccccaaatatcgaccctacagtaaaaggtttg

SEQ ID NO: 7023 - DNA, 38 bp, Homo sapiens
tatccggggcggatacagttatggttactttgttcctt

SEQ ID NO: 7024 - DNA, 39 bp, Homo sapiens
atgggattcgttggttcctttacttcggggacttatatc

SEQ ID NO: 7025 - DNA, 28 bp, Homo sapiens
atccacgattttcggagtggttttcccc

SEQ ID NO: 7026 - DNA, 41 bp, Homo sapiens
tgattgtagtattaccacctgtcgcgttccaaatcaggacc

SEQ ID NO: 7027 - DNA, 33 bp, Homo sapiens
cggcgtggcgggatggtaatgatggttattttc

SEQ ID NO: 7028 - DNA, 20 bp, Homo sapiens
agcgaggtgactggctatgg

SEQ ID NO: 7029 - DNA, 37 bp, Homo sapiens
tcgtgcccgcagagccgtctggcccgggtaattactt

SEQ ID NO: 7030 - DNA, 17 bp, Homo sapiens
gtactacggccaccggg

SEQ ID NO: 7031 - DNA, 23 bp, Homo sapiens
tagggagaaggagttggtacgtg

SEQ ID NO: 7032 - DNA, 31 bp, Homo sapiens
aaagtaaggggcagctcgcccgacccccttt

SEQ ID NO: 7033 - DNA, 33 bp, Homo sapiens
gcgtaatagtccaattaccgtttttggagttgg

SEQ ID NO: 7034 - DNA, 15 bp, Homo sapiens
gggctcaattactat

SEQ ID NO: 7035 - DNA, 22 bp, Homo sapiens
ggcctcaattactattactatc

SEQ ID NO: 7036 - DNA, 28 bp, Homo sapiens
cttaggagaggtgtaatgcttattaagt

SEQ ID NO: 7037 - DNA, 18 bp, Homo sapiens
tgccgggcgctttttggc

SEQ ID NO: 7038 - DNA, 24 bp, Homo sapiens
ctgggtacggttttgtgggacctc

SEQ ID NO: 7039 - DNA, 24 bp, Homo sapiens
tacgggggcgatactgaggtgcga

SEQ ID NO: 7040 - DNA, 31 bp, Homo sapiens
gtgctttggatacagctctaataccccggcg

SEQ ID NO: 7041 - DNA, 31 bp, Homo sapiens
ttttaggccttacgatcttttgactggtttg

SEQ ID NO: 7042 - DNA, 25 bp, Homo sapiens
ccttcagtcagggggggctacaaaa

SEQ ID NO: 7043 - DNA, 13 bp, Homo sapiens
ttgtatcccgttc

SEQ ID NO: 7044 - DNA, 36 bp, Homo sapiens
aaacactaagaaagaggaatggttactctggcccca

SEQ ID NO: 7045 - DNA, 23 bp, Homo sapiens
tgacactggtatttccaagaaaa

SEQ ID NO: 7046 - DNA, 35 bp, Homo sapiens
taacctgccttccctttacggtgactacgaccgga

SEQ ID NO: 7047 - DNA, 18 bp, Homo sapiens
gtcggaactactacgtgg

SEQ ID NO: 7048 - DNA, 23 bp, Homo sapiens
ggctcaattactattattatcat

SEQ ID NO: 7049 - DNA, 30 bp, Homo sapiens
ctcccgtatagtgcctactaattactatta

SEQ ID NO: 7050 - DNA, 18 bp, Homo sapiens
tcccggtggcagctcttc

SEQ ID NO: 7051 - DNA, 30 bp, Homo sapiens
ttcgttgtggtggtctctgctattcctcgg

SEQ ID NO: 7052 - DNA, 21 bp, Homo sapiens
ggctcaattactacttttatc

SEQ ID NO: 7053 - DNA, 21 bp, Homo sapiens
ggctgaattattattattacc

SEQ ID NO: 7054 - DNA, 34 bp, Homo sapiens
cactgccacggtgactacctcactttatttctat

SEQ ID NO: 7055 - DNA, 29 bp, Homo sapiens
tctcaaggccccttttacagtgactacgt

SEQ ID NO: 7056 - DNA, 23 bp, Homo sapiens
ggggagttatggtgacacctatc

SEQ ID NO: 7057 - DNA, 25 bp, Homo sapiens
gctgatctcagcacctcgtccgggc

SEQ ID NO: 7058 - DNA, 24 bp, Homo sapiens
gcacagttatgctctccccccccg

SEQ ID NO: 7059 - DNA, 21 bp, Homo sapiens
ggggggggtggctacaatcgg

SEQ ID NO: 7060 - DNA, 42 bp, Homo sapiens
tagcagtggctggcccagcgaccgctatttccaccactactc

SEQ ID NO: 7061 - DNA, 14 bp, Homo sapiens
tacaagcacgacta

SEQ ID NO: 7062 - DNA, 30 bp, Homo sapiens
gggggattgtactagtaccagctgttatgt

SEQ ID NO: 7063 - DNA, 35 bp, Homo sapiens
gggtcgtgaatacggcgaccgcttctcggtcccca

SEQ ID NO: 7064 - DNA, 33 bp, Homo sapiens
cacccctcgtatctagccgtggctgacggaagg

SEQ ID NO: 7065 - DNA, 37 bp, Homo sapiens
gccgcctattacgatttttggacttctcaggccgggg

SEQ ID NO: 7066 - DNA, 23 bp, Homo sapiens
ggggagctatggtgacacctatc

SEQ ID NO: 7067 - DNA, 33 bp, Homo sapiens
gggtcgtgagtacggtgaccgcttctcggtccc

SEQ ID NO: 7068 - DNA, 20 bp, Homo sapiens
gcgtcttttcccccgcatat

SEQ ID NO: 7069 - DNA, 18 bp, Homo sapiens
atcgcggtcagtgggcaa

SEQ ID NO: 7070 - DNA, 31 bp, Homo sapiens
tagtctttattacgccaacgataaattatac

SEQ ID NO: 7071 - DNA, 37 bp, Homo sapiens
gctcgggggcactggcttgaacgggggagacttccaa

SEQ ID NO: 7072 - DNA, 37 bp, Homo sapiens
cttaatccttcgaggagaccaccacctggggtgccac

SEQ ID NO: 7073 - DNA, 40 bp, Homo sapiens
gttgttggcccatcctgaatcactattcccctaggccatc

SEQ ID NO: 7074 - DNA, 22 bp, Homo sapiens
cgcgttgcggtatagttttgtt

SEQ ID NO: 7075 - DNA, 20 bp, Homo sapiens
tgcctataacagtggctggc

SEQ ID NO: 7076 - DNA, 14 bp, Homo sapiens
aacagactggagat

SEQ ID NO: 7077 - DNA, 42 bp, Homo sapiens
tcagttcatattgtagaggaaacaactgctatggagccccaa

SEQ ID NO: 7078 - DNA, 23 bp, Homo sapiens
ggggagctatggtgacacctatc

SEQ ID NO: 7079 - DNA, 11 bp, Homo sapiens
cccaacagtct

SEQ ID NO: 7080 - DNA, 25 bp, Homo sapiens
caaaatcctgcctggaatttatgcc

SEQ ID NO: 7081 - DNA, 28 bp, Homo sapiens
acgggtggatacagctttgattactcgg

SEQ ID NO: 7082 - DNA, 14 bp, Homo sapiens
taccgccggtccct

SEQ ID NO: 7083 - DNA, 40 bp, Homo sapiens
aagacgtgtttcgatttttggattacttctgccaggggag

SEQ ID NO: 7084 - DNA, 41 bp, Homo sapiens
taatgaccattattgtagtagtaccagctgctatcccgtcg

SEQ ID NO: 7085 - DNA, 39 bp, Homo sapiens
ccctctattactatgatagtagtggttttccagtcctct

SEQ ID NO: 7086 - DNA, 21 bp, Homo sapiens
ttccacggggtgatacgctct

SEQ ID NO: 7087 - DNA, 24 bp, Homo sapiens
gagccaactggggatcttggttcc

SEQ ID NO: 7088 - DNA, 37 bp, Homo sapiens
ggccgcaggggatacgatttttggagtggttattata

SEQ ID NO: 7089 - DNA, 38 bp, Homo sapiens
aagaggggtgggcatattgtggtggtgactgctattca

SEQ ID NO: 7090 - DNA, 33 bp, Homo sapiens
gcaagaggggtgggaaccccgatttttcgcagc

SEQ ID NO: 7091 - DNA, 30 bp, Homo sapiens
gggggcatacagctatggttacgaccccgt

SEQ ID NO: 7092 - DNA, 33 bp, Homo sapiens
ctcctgacgatttttggagtggttattgggggt

SEQ ID NO: 7093 - DNA, 34 bp, Homo sapiens
ctcggagtgggagctactcggtccttctacttgg

SEQ ID NO: 7094 - DNA, 20 bp, Homo sapiens
agaaggtgggagctactttg

SEQ ID NO: 7095 - DNA, 37 bp, Homo sapiens
tgccgtaacgacatggtataactggaactatcaccca

SEQ ID NO: 7096 - DNA, 28 bp, Homo sapiens
tcccgtcaactacggtgactacgtagag

SEQ ID NO: 7097 - DNA, 19 bp, Homo sapiens
tagtgagggcagtggctgg

SEQ ID NO: 7098 - DNA, 39 bp, Homo sapiens
ttggctggtccctgcagtggcttaatttgggctactcta

SEQ ID NO: 7099 - DNA, 40 bp, Homo sapiens
tcacacacttcggggagttatttgtggcgggatctcccgt

SEQ ID NO: 7100 - DNA, 38 bp, Homo sapiens
agggcataggcatagcagcaggtggcgagacacgggct

SEQ ID NO: 7101 - DNA, 28 bp, Homo sapiens
ttctaatgaggcagctcgagggtcggag

SEQ ID NO: 7102 - DNA, 36 bp, Homo sapiens
caagattactatgatagtagtggttactccacggag

SEQ ID NO: 7103 - DNA, 50 bp, Homo sapiens
aagatcagtccggttttgtactaatggtgtatgctatacattcgcctggg

SEQ ID NO: 7104 - DNA, 14 bp, Homo sapiens
gatggcggtgactt

SEQ ID NO: 7105 - DNA, 23 bp, Homo sapiens
gggtagcagcagctgggagtttt

SEQ ID NO: 7106 - DNA, 18 bp, Homo sapiens
aattgatggtggacctcg

SEQ ID NO: 7107 - DNA, 31 bp, Homo sapiens
ccccacgccatacagtaacgctcagctatgt

SEQ ID NO: 7108 - DNA, 24 bp, Homo sapiens
gacccgttacgatacagctcttta

SEQ ID NO: 7109 - DNA, 32 bp, Homo sapiens
gacaggattacgatattttgactcgtagttca

SEQ ID NO: 7110 - DNA, 32 bp, Homo sapiens
agagaaagccatgactacagtaactatcgatt

SEQ ID NO: 7111 - DNA, 39 bp, Homo sapiens
ccccctaggatattgtagtagtaccagctgctatagaac

SEQ ID NO: 7112 - DNA, 33 bp, Homo sapiens
tgacggttccctcaattagatcgtggtcgtcca

SEQ ID NO: 7113 - DNA, 21 bp, Homo sapiens
cagggggacggtacggtgggg

SEQ ID NO: 7114 - DNA, 22 bp, Homo sapiens
atccactacggtgactacttcg

SEQ ID NO: 7115 - DNA, 37 bp, Homo sapiens; identical to SEQ ID NO: 7095

SEQ ID NO: 7116 - DNA, 16 bp, Homo sapiens
tggaggggatgaattc

SEQ ID NO: 7117 - DNA, 28 bp, Homo sapiens
tcaagtgggactacgcgtagttatttct

SEQ ID NO: 7118 - DNA, 28 bp, Homo sapiens
tccggtcgagtatagcagcttagctgga

SEQ ID NO: 7119 - DNA, 25 bp, Homo sapiens
aggcgctggggatcttccctacaag

SEQ ID NO: 7120 - DNA, 27 bp, Homo sapiens
tccagtagagtatagtagctcgtccgg

SEQ ID NO: 7121 - DNA, 37 bp, Homo sapiens
cctgtattacgatttttggagtggttatttcggtggg

SEQ ID NO: 7122 - DNA, 35 bp, Homo sapiens
tcgacgccgtataactggaactccccgtcccccgc

SEQ ID NO: 7123 - DNA, 28 bp, Homo sapiens
tggggatagcagtggctggtacgccaga

SEQ ID NO: 7124 - DNA, 23 bp, Homo sapiens
gtctccgggaccccttatcgtgg

SEQ ID NO: 7125 - DNA, 31 bp, Homo sapiens
gatcccgaccaactatttgtacaggacccat

SEQ ID NO: 7126 - DNA, 38 bp, Homo sapiens
gaagtctggacgatttttggagtggttggatcgaagat

SEQ ID NO: 7127 - DNA, 38 bp, Homo sapiens; identical to SEQ ID NO: 7126

SEQ ID NO: 7128 - DNA, 31 bp, Homo sapiens; identical to SEQ ID NO: 7125

SEQ ID NO: 7129 - DNA, 32 bp, Homo sapiens
gatccgaccccgtatagtgggagatacttcac

SEQ ID NO: 7130 - DNA, 29 bp, Homo sapiens
tccggggggctttggagtggtcgccccat

SEQ ID NO: 7131 - DNA, 28 bp, Homo sapiens
ccccgtcaactacggtgactacgtagag

SEQ ID NO: 7132 - DNA, 19 bp, Homo sapiens
tagtgagggcagtggctgg

SEQ ID NO: 7133 - DNA, 53 bp, Homo sapiens
tagggactgagcgtattacgatttttggagtggttattagtgcggcggctatg

SEQ ID NO: 7134 - DNA, 27 bp, Homo sapiens
tcggtctacgacacgaaaccaatgact

SEQ ID NO: 7135 - DNA, 34 bp, Homo sapiens
gcgtattactatggtttggggagaacgaaaacaa

SEQ ID NO: 7136 - DNA, 39 bp, Homo sapiens
cggggtggggcgtgcggtagtggtggtagctgcttgcct

SEQ ID NO: 7137 - DNA, 27 bp, Homo sapiens
tggtgtagagtatagcacctcgtcgtg

SEQ ID NO: 7138 - DNA, 21 bp, Homo sapiens
gacggagtggcagctcgtggg

SEQ ID NO: 7139 - DNA, 33 bp, Homo sapiens
gcaagaggggtgggaaccccgatttttcgcaga

SEQ ID NO: 7140 - DNA, 31 bp, Homo sapiens; identical to SEQ ID NO: 7125

SEQ ID NO: 7141 - DNA, 14 bp, Homo sapiens
caacgatcggagca

SEQ ID NO: 7142 - DNA, 21 bp, Homo sapiens
ccttcaagggagggatacctg

SEQ ID NO: 7143 - DNA, 38 bp, Homo sapiens
cctcgaccttaaatatagtggctacgattggtccccat

SEQ ID NO: 7144 - DNA, 31 bp, Homo sapiens; identical to SEQ ID NO: 7125

SEQ ID NO: 7145 - DNA, 25 bp, Homo sapiens
tctacgcggtgatttcgtcggacag

SEQ ID NO: 7146 - DNA, 38 bp, Homo sapiens; identical to SEQ ID NO: 7126

SEQ ID NO: 7147 - DNA, 43 bp, Homo sapiens
gggaaaacttacgatttttggagtggttatcctataaaggttg

SEQ ID NO: 7148 - DNA, 33 bp, Homo sapiens; identical to SEQ ID NO: 7092

SEQ ID NO: 7149 - DNA, 25 bp, Homo sapiens
tgaagggggggtgggagctacttat

SEQ ID NO: 7150 - DNA, 28 bp, Homo sapiens
ggggggaaggctatagcagctcgtccag

SEQ ID NO: 7151 - DNA, 17 bp, Homo sapiens
ttcggaaggctacgagt

SEQ ID NO: 7152 - DNA, 20 bp, Homo sapiens
tggccggtgggacctactct

SEQ ID NO: 7153 - DNA, 40 bp, Homo sapiens
tctacgggtggatacagctatggttacgtggggggatcaa

SEQ ID NO: 7154 - DNA, 31 bp, Homo sapiens; identical to SEQ ID NO: 7125

SEQ ID NO: 7155 - DNA, 60 bp, Homo sapiens
attggtgttaagggggggtcctacgatttttggagtggttattatcccaacccaggtgga

SEQ ID NO: 7156 - DNA, 13 bp, Homo sapiens
gagactctcctaa

SEQ ID NO: 7157 - DNA, 14 bp, Homo sapiens
aatcaacgtgcttc

SEQ ID NO: 7158 - DNA, 11 bp, Homo sapiens
atcaagtggac

SEQ ID NO: 7159 - DNA, 11 bp, Homo sapiens
gccccgagagg

SEQ ID NO: 7160 - DNA, 12 bp, Homo sapiens
ttggggaaccgc

SEQ ID NO: 7161 - DNA, 15 bp, Homo sapiens
catgagacctccccg

SEQ ID NO: 7162 - DNA, 11 bp, Homo sapiens
cctgaagcaca

SEQ ID NO: 7163 - DNA, 14 bp, Homo sapiens
cctcaagcacgacg

SEQ ID NO: 7164 - DNA, 22 bp, Homo sapiens
cctgacagatcaacatgacggg

SEQ ID NO: 7165 - DNA, 11 bp, Homo sapiens
caggcgattgg

SEQ ID NO: 7166 - DNA, 10 bp, Homo sapiens
gataaggcgg

SEQ ID NO: 7167 - DNA, 11 bp, Homo sapiens
cacggggaccc

SEQ ID NO: 7168 - DNA, 15 bp, Homo sapiens
tcggccaaggaaaaa

SEQ ID NO: 7169 - DNA, 10 bp, Homo sapiens
caagtttttt

SEQ ID NO: 7170 - DNA, 13 bp, Homo sapiens
aatcaacgttcct

SEQ ID NO: 7171 - DNA, 21 bp, Homo sapiens
ggtccgacctccgcccactac

SEQ ID NO: 7172 - DNA, 10 bp, Homo sapiens
tagcccgaat

SEQ ID NO: 7173 - DNA, 15 bp, Homo sapiens
gtgagaggcccctcc

SEQ ID NO: 7174 - DNA, 13 bp, Homo sapiens
aggggtcccgcta

SEQ ID NO: 7175 - DNA, 29 bp, Homo sapiens
ccgtctattactgtgcgagaggcgccact

SEQ ID NO: 7176 - DNA, 12 bp, Homo sapiens
caacccggtcgc

SEQ ID NO: 7177 - DNA, 12 bp, Homo sapiens
cgttcggcagac

SEQ ID NO: 7178 - DNA, 17 bp, Homo sapiens
aatagaaattatcgtcc

SEQ ID NO: 7179 - DNA, 28 bp, Homo sapiens
gatctccttaaacccccaaatatcgacc

SEQ ID NO: 7180 - DNA, 17 bp, Homo sapiens
atgggattcgttggttc

SEQ ID NO: 7181 - DNA, 12 bp, Homo sapiens
cggcgtggcggg

SEQ ID NO: 7182 - DNA, 19 bp, Homo sapiens
tcgtgcccgcagagccgtc

SEQ ID NO: 7183 - DNA, 10 bp, Homo sapiens
aaagtaaggg

SEQ ID NO: 7184 - DNA, 19 bp, Homo sapiens
gcgtaatagtccaattacc

SEQ ID NO: 7185 - DNA, 15 bp, Homo sapiens
aacctgccttccctt

SEQ ID NO: 7186 - DNA, 15 bp, Homo sapiens
tctcaaggccccttt

SEQ ID NO: 7187 - DNA, 13 bp, Homo sapiens
cacccctcgtatc

SEQ ID NO: 7188 - DNA, 20 bp, Homo sapiens
cttaatccttcgaggagacc

SEQ ID NO: 7189 - DNA, 13 bp, Homo sapiens
gttgttggcccat

SEQ ID NO: 7190 - DNA, 12 bp, Homo sapiens
ggccgcagggga

SEQ ID NO: 7191 - DNA, 11 bp, Homo sapiens
aagaggggtgg

SEQ ID NO: 7192 - DNA, 12 bp, Homo sapiens
ccgtaacgacat

SEQ ID NO: 7193 - DNA, 22 bp, Homo sapiens
ttggctggtccctgcagtggct

SEQ ID NO: 7194 - DNA, 15 bp, Homo sapiens
aagatcagtccggtt

SEQ ID NO: 7195 - DNA, 10 bp, Homo sapiens
ccccacgcca

SEQ ID NO: 7196 - DNA, 10 bp, Homo sapiens
gacccgttac

SEQ ID NO: 7197 - DNA, 19 bp, Homo sapiens
tgacggttccctcaattag

SEQ ID NO: 7198 - DNA, 12 bp, Homo sapiens
ccgtaacgacat

SEQ ID NO: 7199 - DNA, 13 bp, Homo sapiens
gatcccgaccaac

SEQ ID NO: 7200 - DNA, 13 bp, Homo sapiens
gatcccgaccaac

SEQ ID NO: 7201 - DNA, 11 bp, Homo sapiens
gatccgacccc

SEQ ID NO: 7202 - DNA, 11 bp, Homo sapiens
tagggactgag

SEQ ID NO: 7203 - DNA, 16 bp, Homo sapiens
cggggtggggcgtgcg

SEQ ID NO: 7204 - DNA, 13 bp, Homo sapiens
gatcccgaccaac

SEQ ID NO: 7205 - DNA, 12 bp, Homo sapiens
cctcgaccttaa

SEQ ID NO: 7206 - DNA, 13 bp, Homo sapiens
gatcccgaccaac

SEQ ID NO: 7207 - DNA, 10 bp, Homo sapiens
tgaagggggg

SEQ ID NO: 7208 - DNA, 11 bp, Homo sapiens
ggggggaaggc

SEQ ID NO: 7209 - DNA, 13 bp, Homo sapiens
gatcccgaccaac

SEQ ID NO: 7210 - DNA, 21 bp, Homo sapiens
attggtgttaagggggggtcc

SEQ ID NO: 7211 - DNA, 12 bp, Homo sapiens
gtattactatga

SEQ ID NO: 7212 - DNA, 13 bp, Homo sapiens
tgggtgatgttgt

SEQ ID NO: 7213 - DNA, 12 bp, Homo sapiens
ggggaacaatcg

SEQ ID NO: 7214 - DNA, 10 bp, Homo sapiens
tatggaatac

SEQ ID NO: 7215 - DNA, 17 bp, Homo sapiens
gtggatacaactatggt

SEQ ID NO: 7216 - DNA, 11 bp, Homo sapiens
catttttggag

SEQ ID NO: 7217 - DNA, 16 bp, Homo sapiens
tataatcacagctggt

SEQ ID NO: 7218 - DNA, 20 bp, Homo sapiens
tattacgatttttggagtgg

SEQ ID NO: 7219 - DNA, 24 bp, Homo sapiens
ttattttgatagtagtacttatta

SEQ ID NO: 7220 - DNA, 12 bp, Homo sapiens
ggggaacaatcg

SEQ ID NO: 7221 - DNA, 21 bp, Homo sapiens
atggttcgggatgtctttata

SEQ ID NO: 7222 - DNA, 12 bp, Homo sapiens
gtggcggtggta

SEQ ID NO: 7223 - DNA, 25 bp, Homo sapiens
attacgatttatggagtgcttgtta

SEQ ID NO: 7224 - DNA, 26 bp, Homo sapiens
attgtactaatggtgtatgctatacc

SEQ ID NO: 7225 - DNA, 14 bp, Homo sapiens
acgattgttttagt

SEQ ID NO: 7226 - DNA, 21 bp, Homo sapiens
tattgtagtagtaccagctgc

SEQ ID NO: 7227 - DNA, 19 bp, Homo sapiens
attgttatagtaccgcctg

SEQ ID NO: 7228 - DNA, 22 bp, Homo sapiens
tgtaccagtgccagctgccata

SEQ ID NO: 7229 - DNA, 10 bp, Homo sapiens
gtggggaatc

SEQ ID NO: 7230 - DNA, 18 bp, Homo sapiens
agtgatggttattactac

SEQ ID NO: 7231 - DNA, 12 bp, Homo sapiens
gactataatccc

SEQ ID NO: 7232 - DNA, 14 bp, Homo sapiens
ggaactagcggtta

SEQ ID NO: 7233 - DNA, 13 bp, Homo sapiens
gtggtcctaggtg

SEQ ID NO: 7234 - DNA, 12 bp, Homo sapiens
actaatggtcta

SEQ ID NO: 7235 - DNA, 19 bp, Homo sapiens
gggtatgccagtggctggt

SEQ ID NO: 7236 - DNA, 11 bp, Homo sapiens
ctaactgggga

SEQ ID NO: 7237 - DNA, 14 bp, Homo sapiens
tgacaacgatgact

SEQ ID NO: 7238 - DNA, 16 bp, Homo sapiens
cgatttttggagtcgt

SEQ ID NO: 7239 - DNA, 13 bp, Homo sapiens
gggagggctatgc

SEQ ID NO: 7240 - DNA, 11 bp, Homo sapiens
tggatggggga

SEQ ID NO: 7241 - DNA, 13 bp, Homo sapiens
gggagggctatgc

SEQ ID NO: 7242 - DNA, 10 bp, Homo sapiens
gtacagtggg

SEQ ID NO: 7243 - DNA, 13 bp, Homo sapiens
ggggggtatggtt

SEQ ID NO: 7244 - DNA, 24 bp, Homo sapiens
ttgtagtggtggtacctgctactc

SEQ ID NO: 7245 - DNA, 13 bp, Homo sapiens
agagatgcctaca

SEQ ID NO: 7246 - DNA, 10 bp, Homo sapiens
cgatattttg

SEQ ID NO: 7247 - DNA, 14 bp, Homo sapiens
tagtccgggctact

SEQ ID NO: 7248 - DNA, 14 bp, Homo sapiens
tggggtggctttta

SEQ ID NO: 7249 - DNA, 22 bp, Homo sapiens
ttgtactaatggtgcatgctat

SEQ ID NO: 7250 - DNA, 18 bp, Homo sapiens
ggatacagttctgggtac

SEQ ID NO: 7251 - DNA, 15 bp, Homo sapiens
gtataactgcaacca

SEQ ID NO: 7252 - DNA, 10 bp, Homo sapiens
gttcagggag

SEQ ID NO: 7253 - DNA, 17 bp, Homo sapiens
tataacgatttttggag

SEQ ID NO: 7254 - DNA, 19 bp, Homo sapiens
gtggatatagttcctacga

SEQ ID NO: 7255 - DNA, 24 bp, Homo sapiens
taatacgatttttggagtggtcat

SEQ ID NO: 7256 - DNA, 18 bp, Homo sapiens
tacgctggttcggggagt

SEQ ID NO: 7257 - DNA, 15 bp, Homo sapiens
agtggttatttctac

SEQ ID NO: 7258 - DNA, 15 bp, Homo sapiens
tagcaacacctggta

SEQ ID NO: 7259 - DNA, 16 bp, Homo sapiens
tattctggttcgggga

SEQ ID NO: 7260 - DNA, 14 bp, Homo sapiens
tacagaagctcgtc

SEQ ID NO: 7261 - DNA, 19 bp, Homo sapiens
tatggctcggggagttatt

SEQ ID NO: 7262 - DNA, 12 bp, Homo sapiens
tgactatggtga

SEQ ID NO: 7263 - DNA, 10 bp, Homo sapiens
cgttattttg

SEQ ID NO: 7264 - DNA, 13 bp, Homo sapiens
tatggcccgagcc

SEQ ID NO: 7265 - DNA, 15 bp, Homo sapiens
gatagtagtggttat

SEQ ID NO: 7266 - DNA, 19 bp, Homo sapiens
tgcagcagtaccagctgct

SEQ ID NO: 7267 - DNA, 14 bp, Homo sapiens
atcgggatagtgac

SEQ ID NO: 7268 - DNA, 14 bp, Homo sapiens
gggatgttcttgta

SEQ ID NO: 7269 - DNA, 15 bp, Homo sapiens
tatagcaccacctgg

SEQ ID NO: 7270 - DNA, 12 bp, Homo sapiens
ggaagctacaac

SEQ ID NO: 7271 - DNA, 15 bp, Homo sapiens
gggatagtgggagct

SEQ ID NO: 7272 - DNA, 12 bp, Homo sapiens
ttcgggggactt

SEQ ID NO: 7273 - DNA, 18 bp, Homo sapiens
ggatacagttatggttac

SEQ ID NO: 7274 - DNA, 19 bp, Homo sapiens
ctttacttcggggacttat

SEQ ID NO: 7275 - DNA, 18 bp, Homo sapiens
acgattttcggagtggtt

SEQ ID NO: 7276 - DNA, 19 bp, Homo sapiens
attgtagtattaccacctg

SEQ ID NO: 7277 - DNA, 18 bp, Homo sapiens
atggtaatgatggttatt

SEQ ID NO: 7278 - DNA, 11 bp, Homo sapiens
tgactggctat

SEQ ID NO: 7279 - DNA, 15 bp, Homo sapiens
tggcccgggtaatta

SEQ ID NO: 7280 - DNA, 15 bp, Homo sapiens
agaaggagttggtac

SEQ ID NO: 7281 - DNA, 11 bp, Homo sapiens
gcagctcgccc

SEQ ID NO: 7282 - DNA, 12 bp, Homo sapiens
gtttttggagtt

SEQ ID NO: 7283 - DNA, 12 bp, Homo sapiens
ggcctcaattac

SEQ ID NO: 7284 - DNA, 14 bp, Homo sapiens
ggtgtaatgcttat

SEQ ID NO: 7285 - DNA, 10 bp, Homo sapiens
cgctttttgg

SEQ ID NO: 7286 - DNA, 15 bp, Homo sapiens
ggttttgtgggacct

SEQ ID NO: 7287 - DNA, 10 bp, Homo sapiens
gggggcgata

SEQ ID NO: 7288 - DNA, 11 bp, Homo sapiens
tggatacagct

SEQ ID NO: 7289 - DNA, 20 bp, Homo sapiens
ttacgatcttttgactggtt

SEQ ID NO: 7290 - DNA, 14 bp, Homo sapiens
agggggggctacaa

SEQ ID NO: 7291 - DNA, 17 bp, Homo sapiens
gaaagaggaatggttac

SEQ ID NO: 7292 - DNA, 12 bp, Homo sapiens
gtatttccaaga

SEQ ID NO: 7293 - DNA, 12 bp, Homo sapiens
tacggtgactac

SEQ ID NO: 7294 - DNA, 14 bp, Homo sapiens
gtcggaactactac

SEQ ID NO: 7295 - DNA, 11 bp, Homo sapiens
attactattat

SEQ ID NO: 7296 - DNA, 12 bp, Homo sapiens
tatagtgcctac

SEQ ID NO: 7297 - DNA, 14 bp, Homo sapiens
ggtggcagctcttc

SEQ ID NO: 7298 - DNA, 22 bp, Homo sapiens
ttgtggtggtctctgctattcc

SEQ ID NO: 7299 - DNA, 12 bp, Homo sapiens
attactactttt

SEQ ID NO: 7300 - DNA, 17 bp, Homo sapiens
tgaattattattattac

SEQ ID NO: 7301 - DNA, 11 bp, Homo sapiens
acggtgactac

SEQ ID NO: 7302 - DNA, 12 bp, Homo sapiens
tacagtgactac

SEQ ID NO: 7303 - DNA, 19 bp, Homo sapiens
ggggagttatggtgacacc

SEQ ID NO: 7304 - DNA, 12 bp, Homo sapiens
agcacctcgtcc

SEQ ID NO: 7305 - DNA, 15 bp, Homo sapiens
gggggtggctacaat

SEQ ID NO: 7306 - DNA, 13 bp, Homo sapiens
tagcagtggctgg

SEQ ID NO: 7307 - DNA, 12 bp, Homo sapiens
tacaagcacgac

SEQ ID NO: 7308 - DNA, 24 bp, Homo sapiens
attgtactagtaccagctgttatg

SEQ ID NO: 7309 - DNA, 13 bp, Homo sapiens
tgaatacggcgac

SEQ ID NO: 7310 - DNA, 12 bp, Homo sapiens
tagccgtggctg

SEQ ID NO: 7311 - DNA, 16 bp, Homo sapiens
tattacgatttttgga

SEQ ID NO: 7312 - DNA, 19 bp, Homo sapiens
ggggagctatggtgacacc

SEQ ID NO: 7313 - DNA, 13 bp, Homo sapiens
tgagtacggtgac

SEQ ID NO: 7314 - DNA, 11 bp, Homo sapiens
gcggtcagtgg

SEQ ID NO: 7315 - DNA, 13 bp, Homo sapiens
tagtctttattac

SEQ ID NO: 7316 - DNA, 14 bp, Homo sapiens
gcactggcttgaac

SEQ ID NO: 7317 - DNA, 15 bp, Homo sapiens
accacctggggtgcc

SEQ ID NO: 7318 - DNA, 10 bp, Homo sapiens
cctgaatcac

SEQ ID NO: 7319 - DNA, 13 bp, Homo sapiens
gtatagttttgtt

SEQ ID NO: 7320 - DNA, 15 bp, Homo sapiens
tataacagtggctgg

SEQ ID NO: 7321 - DNA, 13 bp, Homo sapiens
catattgtagagg

SEQ ID NO: 7322 - DNA, 19 bp, Homo sapiens
ggggagctatggtgacacc

SEQ ID NO: 7323 - DNA, 14 bp, Homo sapiens
tgcctggaatttat

SEQ ID NO: 7324 - DNA, 20 bp, Homo sapiens
gtggatacagctttgattac

SEQ ID NO: 7325 - DNA, 10 bp, Homo sapiens
taccgccggt

SEQ ID NO: 7326 - DNA, 17 bp, Homo sapiens
gtgtttcgatttttgga

SEQ ID NO: 7327 - DNA, 27 bp, Homo sapiens
tattgtagtagtaccagctgctatccc

SEQ ID NO: 7328 - DNA, 22 bp, Homo sapiens
tattactatgatagtagtggtt

SEQ ID NO: 7329 - DNA, 13 bp, Homo sapiens
ggggtgatacgct

SEQ ID NO: 7330 - DNA, 25 bp, Homo sapiens
tacgatttttggagtggttattata

SEQ ID NO: 7331 - DNA, 26 bp, Homo sapiens
gcatattgtggtggtgactgctattc

SEQ ID NO: 7332 - DNA, 12 bp, Homo sapiens
ggtgggaacccc

SEQ ID NO: 7333 - DNA, 16 bp, Homo sapiens
atacagctatggttac

SEQ ID NO: 7334 - DNA, 21 bp, Homo sapiens
acgatttttggagtggttatt

SEQ ID NO: 7335 - DNA, 13 bp, Homo sapiens
agtgggagctact

SEQ ID NO: 7336 - DNA, 12 bp, Homo sapiens
gtgggagctact

SEQ ID NO: 7337 - DNA, 16 bp, Homo sapiens
ggtataactggaacta

SEQ ID NO: 7338 - DNA, 14 bp, Homo sapiens
actacggtgactac

SEQ ID NO: 7339 - DNA, 11 bp, Homo sapiens
gcagtggctgg

SEQ ID NO: 7340 - DNA, 14 bp, Homo sapiens
taatttgggctact

SEQ ID NO: 7341 - DNA, 14 bp, Homo sapiens
ttcggggagttatt

SEQ ID NO: 7342 - DNA, 17 bp, Homo sapiens
ggcatagcagcaggtgg

SEQ ID NO: 7343 - DNA, 22 bp, Homo sapiens
attactatgatagtagtggtta

SEQ ID NO: 7344 - DNA, 24 bp, Homo sapiens
ttgtactaatggtgtatgctatac

SEQ ID NO: 7345 - DNA, 13 bp, Homo sapiens
tagcagcagctgg

SEQ ID NO: 7346 - DNA, 12 bp, Homo sapiens
attgatggtgga

SEQ ID NO: 7347 - DNA, 20 bp, Homo sapiens
attacgatattttgactcgt

SEQ ID NO: 7348 - DNA, 15 bp, Homo sapiens
tgactacagtaacta

SEQ ID NO: 7349 - DNA, 29 bp, Homo sapiens
aggatattgtagtagtaccagctgctata

SEQ ID NO: 7350 - DNA, 11 bp, Homo sapiens
atcgtggtcgt

SEQ ID NO: 7351 - DNA, 11 bp, Homo sapiens
ggtacggtggg

SEQ ID NO: 7352 - DNA, 14 bp, Homo sapiens
actacggtgactac

SEQ ID NO: 7353 - DNA, 16 bp, Homo sapiens
ggtataactggaacta

SEQ ID NO: 7354 - DNA, 10 bp, Homo sapiens
tggaggggat

SEQ ID NO: 7355 - DNA, 12 bp, Homo sapiens
aagtgggactac

SEQ ID NO: 7356 - DNA, 13 bp, Homo sapiens
gagtatagcagct

SEQ ID NO: 7357 - DNA, 18 bp, Homo sapiens
gagtatagtagctcgtcc

SEQ ID NO: 7358 - DNA, 26 bp, Homo sapiens
gtattacgatttttggagtggttatt

SEQ ID NO: 7359 - DNA, 14 bp, Homo sapiens
gtataactggaact

SEQ ID NO: 7360 - DNA, 21 bp, Homo sapiens
ggggatagcagtggctggtac

SEQ ID NO: 7361 - DNA, 12 bp, Homo sapiens
gggaccccttat

SEQ ID NO: 7362 - DNA, 12 bp, Homo sapiens
tatttgtacagg

SEQ ID NO: 7363 - DNA, 18 bp, Homo sapiens
acgatttttggagtggtt

SEQ ID NO: 7364 - DNA, 18 bp, Homo sapiens
acgatttttggagtggtt

SEQ ID NO: 7365 - DNA, 12 bp, Homo sapiens
tatttgtacagg

SEQ ID NO: 7366 - DNA, 17 bp, Homo sapiens
gtatagtgggagatact

SEQ ID NO: 7367 - DNA, 11 bp, Homo sapiens
tttggagtggt

SEQ ID NO: 7368 - DNA, 14 bp, Homo sapiens
actacggtgactac

SEQ ID NO: 7369 - DNA, 11 bp, Homo sapiens
gcagtggctgg

SEQ ID NO: 7370 - DNA, 27 bp, Homo sapiens
gtattacgatttttggagtggttatta

SEQ ID NO: 7371 - DNA, 11 bp, Homo sapiens
tacgacacgaa

SEQ ID NO: 7372 - DNA, 21 bp, Homo sapiens
gtattactatggtttggggag

SEQ ID NO: 7373 - DNA, 18 bp, Homo sapiens
gtagtggtggtagctgct

SEQ ID NO: 7374 - DNA, 17 bp, Homo sapiens
gagtatagcacctcgtc

SEQ ID NO: 7375 - DNA, 12 bp, Homo sapiens
ggtgggaacccc

SEQ ID NO: 7376 - DNA, 12 bp, Homo sapiens
tatttgtacagg

SEQ ID NO: 7377 - DNA, 12 bp, Homo sapiens
agggagggatac

SEQ ID NO: 7378 - DNA, 17 bp, Homo sapiens
atatagtggctacgatt

SEQ ID NO: 7379 - DNA, 12 bp, Homo sapiens
tatttgtacagg

SEQ ID NO: 7380 - DNA, 11 bp, Homo sapiens
ggtgatttcgt

SEQ ID NO: 7381 - DNA, 18 bp, Homo sapiens
acgatttttggagtggtt

SEQ ID NO: 7382 - DNA, 22 bp, Homo sapiens
ttacgatttttggagtggttat

SEQ ID NO: 7383 - DNA, 21 bp, Homo sapiens
acgatttttggagtggttatt

SEQ ID NO: 7384 - DNA, 12 bp, Homo sapiens
gtgggagctact

SEQ ID NO: 7385 - DNA, 15 bp, Homo sapiens
tatagcagctcgtcc

SEQ ID NO: 7386 - DNA, 12 bp, Homo sapiens
gtgggacctact

SEQ ID NO: 7387 - DNA, 20 bp, Homo sapiens
gtggatacagctatggttac

SEQ ID NO: 7388 - DNA, 12 bp, Homo sapiens
tatttgtacagg

SEQ ID NO: 7389 - DNA, 27 bp, Homo sapiens
tacgatttttggagtggttattatccc

SEQ ID NO: 7390 - DNA, 11 bp, Homo sapiens
gtcctttttct

SEQ ID NO: 7391 - DNA, 10 bp, Homo sapiens
ctcacttgtc

SEQ ID NO: 7392 - DNA, 20 bp, Homo sapiens
ccaggtggacgtttgattct

SEQ ID NO: 7393 - DNA, 20 bp, Homo sapiens
tgacggtgatggtttcgact

SEQ ID NO: 7394 - DNA, 12 bp, Homo sapiens
cgccgcccgcag

SEQ ID NO: 7395 - DNA, 13 bp, Homo sapiens
ttcggctgtccac

SEQ ID NO: 7396 - DNA, 30 bp, Homo sapiens
cccacgagaattatactactcccctggggg

SEQ ID NO: 7397 - DNA, 14 bp, Homo sapiens
gaggaccaacctcc

SEQ ID NO: 7398 - DNA, 27 bp, Homo sapiens
acaggaccagcctatgtcaatgcagag

SEQ ID NO: 7399 - DNA, 32 bp, Homo sapiens
tggcccctttcgggccagtaggacacttgagc

SEQ ID NO: 7400 - DNA, 14 bp, Homo sapiens
tggacgggaatgcc

SEQ ID NO: 7401 - DNA, 14 bp, Homo sapiens
ccgacgggttgggg

SEQ ID NO: 7402 - DNA, 15 bp, Homo sapiens
cggtgttccgacacc

SEQ ID NO: 7403 - DNA, 15 bp, Homo sapiens
cggtgttccgacacc

SEQ ID NO: 7404 - DNA, 13 bp, Homo sapiens
cgggtccctcagg

SEQ ID NO: 7405 - DNA, 24 bp, Homo sapiens
gatgatgtcgccggctactactgg

SEQ ID NO: 7406 - DNA, 11 bp, Homo sapiens
ccaaccccccg

SEQ ID NO: 7407 - DNA, 10 bp, Homo sapiens
gggttattgg

SEQ ID NO: 7408 - DNA, 11 bp, Homo sapiens
cgggaggcagt

SEQ ID NO: 7409 - DNA, 18 bp, Homo sapiens
gctcagggagccatcggg

SEQ ID NO: 7410 - DNA, 13 bp, Homo sapiens
gacacgggggagg

SEQ ID NO: 7411 - DNA, 11 bp, Homo sapiens
tgcggaggggc

SEQ ID NO: 7412 - DNA, 10 bp, Homo sapiens
ccctttttcg

SEQ ID NO: 7413 - DNA, 20 bp, Homo sapiens
tcgcgttccaaatcaggacc

SEQ ID NO: 7414 - DNA, 10 bp, Homo sapiens
tattactatc

SEQ ID NO: 7415 - DNA, 11 bp, Homo sapiens
ctgaggtgcga

SEQ ID NO: 7416 - DNA, 14 bp, Homo sapiens
ctaataccccggcg

SEQ ID NO: 7417 - DNA, 10 bp, Homo sapiens
tctggcccca

SEQ ID NO: 7418 - DNA, 12 bp, Homo sapiens
taattactatta

SEQ ID NO: 7419 - DNA, 16 bp, Homo sapiens
ctcactttatttctat

SEQ ID NO: 7420 - DNA, 11 bp, Homo sapiens
ctccccccccg

SEQ ID NO: 7421 - DNA, 29 bp, Homo sapiens
cccagcgaccgctatttccaccactactc

SEQ ID NO: 7422 - DNA, 16 bp, Homo sapiens
cgcttctcggtcccca

SEQ ID NO: 7423 - DNA, 15 bp, Homo sapiens
cttctcaggccgggg

SEQ ID NO: 7424 - DNA, 14 bp, Homo sapiens
cgcttctcggtccc

SEQ ID NO: 7425 - DNA, 18 bp, Homo sapiens
gccaacgataaattatac

SEQ ID NO: 7426 - DNA, 15 bp, Homo sapiens
gggggagacttccaa

SEQ ID NO: 7427 - DNA, 17 bp, Homo sapiens
tattcccctaggccatc

SEQ ID NO: 7428 - DNA, 23 bp, Homo sapiens
aaacaactgctatggagccccaa

SEQ ID NO: 7429 - DNA, 18 bp, Homo sapiens
ttacttctgccaggggag

SEQ ID NO: 7430 - DNA, 11 bp, Homo sapiens
ttccagtcctc

SEQ ID NO: 7431 - DNA, 10 bp, Homo sapiens
tcttggttcc

SEQ ID NO: 7432 - DNA, 13 bp, Homo sapiens
gatttttcgcagc

SEQ ID NO: 7433 - DNA, 16 bp, Homo sapiens
cggtccttctacttgg

SEQ ID NO: 7434 - DNA, 18 bp, Homo sapiens
tgtggcgggatctcccgt

SEQ ID NO: 7435 - DNA, 12 bp, Homo sapiens
cgagacacgggc

SEQ ID NO: 7436 - DNA, 10 bp, Homo sapiens
agggtcggag

SEQ ID NO: 7437 - DNA, 10 bp, Homo sapiens
ctccacggag

SEQ ID NO: 7438 - DNA, 11 bp, Homo sapiens
attcgcctggg

SEQ ID NO: 7439 - DNA, 12 bp, Homo sapiens
gctcagctatgt

SEQ ID NO: 7440 - DNA, 14 bp, Homo sapiens
gcgtagttatttct

SEQ ID NO: 7441 - DNA, 13 bp, Homo sapiens
tcttccctacaag

SEQ ID NO: 7442 - DNA, 13 bp, Homo sapiens
ccccgtcccccgc

SEQ ID NO: 7443 - DNA, 11 bp, Homo sapiens
ggatcgaagat

SEQ ID NO: 7444 - DNA, 11 bp, Homo sapiens
ggatcgaagat

SEQ ID NO: 7445 - DNA, 14 bp, Homo sapiens
gtgcggcggctatg

SEQ ID NO: 7446 - DNA, 10 bp, Homo sapiens
accaatgact

SEQ ID NO: 7447 - DNA, 11 bp, Homo sapiens
aacgaaaacaa

SEQ ID NO: 7448 - DNA, 13 bp, Homo sapiens
gatttttcgcaga

SEQ ID NO: 7449 - DNA, 11 bp, Homo sapiens
ggatcgaagat

SEQ ID NO: 7450 - DNA, 13 bp, Homo sapiens
cctataaaggttg

SEQ ID NO: 7451 - DNA, 13 bp, Homo sapiens
gtggggggatcaa

SEQ ID NO: 7452 - DNA, 12 bp, Homo sapiens
aacccaggtgga

SEQ ID NO: 7453 - DNA, 16 bp, Homo sapiens
atacctccaacactgg

SEQ ID NO: 7454 - DNA, 20 bp, Homo sapiens
actacggtctggacgtctgg

SEQ ID NO: 7455 - DNA, 27 bp, Homo sapiens
tactactactactacatggacgtctgg

SEQ ID NO: 7456 - DNA, 13 bp, Homo sapiens
ctttgactcctgg

SEQ ID NO: 7457 - DNA, 15 bp, Homo sapiens
tactttgacttctgg

SEQ ID NO: 7458 - DNA, 11 bp, Homo sapiens
ttgacttttgg

SEQ ID NO: 7459 - DNA, 17 bp, Homo sapiens
actggttcgacccctgg

SEQ ID NO: 7460 - DNA, 13 bp, Homo sapiens
ctttgactactgg

SEQ ID NO: 7461 - DNA, 31 bp, Homo sapiens
ttcctactactactactacatggacgtctgg

SEQ ID NO: 7462 - DNA, 13 bp, Homo sapiens
ttttgatgtgtgg

SEQ ID NO: 7463 - DNA, 22 bp, Homo sapiens
ctactggtacttcgatctctgg

SEQ ID NO: 7464 - DNA, 18 bp, Homo sapiens
aactggctcgacccctgg

SEQ ID NO: 7465 - DNA, 14 bp, Homo sapiens
actttgactactgg

SEQ ID NO: 7466 - DNA, 17 bp, Homo sapiens
actactttaaccactgg

SEQ ID NO: 7467 - DNA, 20 bp, Homo sapiens
actggtacctcgatctctgg

SEQ ID NO: 7468 - DNA, 28 bp, Homo sapiens
ctactactactactacatggacgtctgg

SEQ ID NO: 7469 - DNA, 19 bp, Homo sapiens
tgatgcttttgatatctgg

SEQ ID NO: 7470 - DNA, 20 bp, Homo sapiens
actggtacttcgatctctgg

SEQ ID NO: 7471 - DNA, 12 bp, Homo sapiens
atggacgtctgg

SEQ ID NO: 7472 - DNA, 17 bp, Homo sapiens
actactttgactactgg

SEQ ID NO: 7473 - DNA, 13 bp, Homo sapiens
ctttgactcttgg

SEQ ID NO: 7474 - DNA, 14 bp, Homo sapiens
actttgcctcctgg

SEQ ID NO: 7475 - DNA, 10 bp, Homo sapiens
tgactactgg

SEQ ID NO: 7476 - DNA, 11 bp, Homo sapiens
ttgcctactgg

SEQ ID NO: 7477 - DNA, 12 bp, Homo sapiens
tttgaattctgg

SEQ ID NO: 7478 - DNA, 14 bp, Homo sapiens
cttttgatatctgg

SEQ ID NO: 7479 - DNA, 24 bp, Homo sapiens
tactactacggtctggacgtctgg

SEQ ID NO: 7480 - DNA, 17 bp, Homo sapiens
actgtttcgacccctgg

SEQ ID NO: 7481 - DNA, 19 bp, Homo sapiens
caactggttcgacccctgg

SEQ ID NO: 7482 - DNA, 15 bp, Homo sapiens
tattttgactactgg

SEQ ID NO: 7483 - DNA, 19 bp, Homo sapiens
caactggttcgacccctgg

SEQ ID NO: 7484 - DNA, 14 bp, Homo sapiens
actttgactactgg

SEQ ID NO: 7485 - DNA, 22 bp, Homo sapiens
ctactactacatggacgtctgg

SEQ ID NO: 7486 - DNA, 10 bp, Homo sapiens
tgactattgg

SEQ ID NO: 7487 - DNA, 15 bp, Homo sapiens
taccttgactcctgg

SEQ ID NO: 7488 - DNA, 18 bp, Homo sapiens
tacggtatggacgtctgg

SEQ ID NO: 7489 - DNA, 17 bp, Homo sapiens
actactttgaccactgg

SEQ ID NO: 7490 - DNA, 17 bp, Homo sapiens
actactttgacaactgg

SEQ ID NO: 7491 - DNA, 18 bp, Homo sapiens
tacactatggacgtctgg

SEQ ID NO: 7492 - DNA, 24 bp, Homo sapiens
tattactacggtatggacgtctgg

SEQ ID NO: 7493 - DNA, 14 bp, Homo sapiens
cttttgacacctgg

SEQ ID NO: 7494 - DNA, 14 bp, Homo sapiens
actttgactactgg

SEQ ID NO: 7495 - DNA, 17 bp, Homo sapiens
ggtacttcgatctctgg

SEQ ID NO: 7496 - DNA, 12 bp, Homo sapiens
tttgactcctgg

SEQ ID NO: 7497 - DNA, 11 bp, Homo sapiens
ttgactattgg

SEQ ID NO: 7498 - DNA, 12 bp, Homo sapiens
tttgactactgg

SEQ ID NO: 7499 - DNA, 18 bp, Homo sapiens
gatccttttgatatctgg

SEQ ID NO: 7500 - DNA, 11 bp, Homo sapiens
ttgactcctgg

SEQ ID NO: 7501 - DNA, 17 bp, Homo sapiens
actactttgactcctgg

SEQ ID NO: 7502 - DNA, 15 bp, Homo sapiens
taccttgactcctgg

SEQ ID NO: 7503 - DNA, 15 bp, Homo sapiens
tggttcgacccctgg

SEQ ID NO: 7504 - DNA, 16 bp, Homo sapiens
ctactttgaatactgg

SEQ ID NO: 7505 - DNA, 17 bp, Homo sapiens
actatttcgacccctgg

SEQ ID NO: 7506 - DNA, 15 bp, Homo sapiens
tggttcgacccctgg

SEQ ID NO: 7507 - DNA, 29 bp, Homo sapiens
actgctactactactacatggatgtctgg

SEQ ID NO: 7508 - DNA, 17 bp, Homo sapiens
actggctcgacccctgg

SEQ ID NO: 7509 - DNA, 20 bp, Homo sapiens
actatggtatggacgtctgg

SEQ ID NO: 7510 - DNA, 17 bp, Homo sapiens
actactttgactactgg

SEQ ID NO: 7511 - DNA, 11 bp, Homo sapiens
ttgattactgg

SEQ ID NO: 7512 - DNA, 17 bp, Homo sapiens
atgcttttgatatctgg

SEQ ID NO: 7513 - DNA, 11 bp, Homo sapiens
ttgactactgg

SEQ ID NO: 7514 - DNA, 15 bp, Homo sapiens
tactttgacgtctgg

SEQ ID NO: 7515 - DNA, 25 bp, Homo sapiens
ctactacttcttcatggacgtctgg

SEQ ID NO: 7516 - DNA, 12 bp, Homo sapiens
atggacgtctgg

SEQ ID NO: 7517 - DNA, 10 bp, Homo sapiens
tgactactgg

SEQ ID NO: 7518 - DNA, 17 bp, Homo sapiens
actactttgactactgg

SEQ ID NO: 7519 - DNA, 24 bp, Homo sapiens
tactatcacggtatggacgtctgg

SEQ ID NO: 7520 - DNA, 17 bp, Homo sapiens
acggcatggacgtctgg

SEQ ID NO: 7521 - DNA, 17 bp, Homo sapiens
actactttgacttctgg

SEQ ID NO: 7522 - DNA, 19 bp, Homo sapiens
ctacggtatggacgtctgg

SEQ ID NO: 7523 - DNA, 11 bp, Homo sapiens
ttgcctactgg

SEQ ID NO: 7524 - DNA, 15 bp, Homo sapiens
tactttgattactgg

SEQ ID NO: 7525 - DNA, 12 bp, Homo sapiens
tttgactcctgg

SEQ ID NO: 7526 - DNA, 10 bp, Homo sapiens
tgactactgg

SEQ ID NO: 7527 - DNA, 19 bp, Homo sapiens
cttcgttatggacgtctgg

SEQ ID NO: 7528 - DNA, 11 bp, Homo sapiens
ttgactcctgg

SEQ ID NO: 7529 - DNA, 17 bp, Homo sapiens
atgcttttgatatttgg

SEQ ID NO: 7530 - DNA, 17 bp, Homo sapiens
atgcttttgacatctgg

SEQ ID NO: 7531 - DNA, 17 bp, Homo sapiens
actactttgactactgg

SEQ ID NO: 7532 - DNA, 15 bp, Homo sapiens
ggaatggacgtctgg

SEQ ID NO: 7533 - DNA, 10 bp, Homo sapiens
tgacttctgg

SEQ ID NO: 7534 - DNA, 13 bp, Homo sapiens
ctttgactactgg

SEQ ID NO: 7535 - DNA, 20 bp, Homo sapiens
actggtacttcgatgtctgg

SEQ ID NO: 7536 - DNA, 17 bp, Homo sapiens
acggtatggacctctgg

SEQ ID NO: 7537 - DNA, 17 bp, Homo sapiens
acggaatggacgtttgg

SEQ ID NO: 7538 - DNA, 21 bp, Homo sapiens
taccacggaatggacgtctgg

SEQ ID NO: 7539 - DNA, 16 bp, Homo sapiens
ctactttgagtcctgg

SEQ ID NO: 7540 - DNA, 26 bp, Homo sapiens
actcctattacggtatggacgtctgg

SEQ ID NO: 7541 - DNA, 17 bp, Homo sapiens
actactttgactactgg

SEQ ID NO: 7542 - DNA, 10 bp, Homo sapiens
tgactactgg

SEQ ID NO: 7543 - DNA, 14 bp, Homo sapiens
actttgacatctgg

SEQ ID NO: 7544 - DNA, 16 bp, Homo sapiens
cgggttggacgtctgg

SEQ ID NO: 7545 - DNA, 20 bp, Homo sapiens
actggtatttcgatctctgg

SEQ ID NO: 7546 - DNA, 18 bp, Homo sapiens
gatgcttttgatatctgg

SEQ ID NO: 7547 - DNA, 15 bp, Homo sapiens
tggttcggctcctgg

SEQ ID NO: 7548 - DNA, 26 bp, Homo sapiens
actcctactacgctatggacgtctgg

SEQ ID NO: 7549 - DNA, 22 bp, Homo sapiens
  modified_base (19)..(19): a, c, t, g, unknown or other
ctactggtacttcgatctntgg

SEQ ID NO: 7550 - DNA, 15 bp, Homo sapiens
tattttgagtactgg

SEQ ID NO: 7551 - DNA, 18 bp, Homo sapiens
tggtacttcgatctctgg

SEQ ID NO: 7552 - DNA, 18 bp, Homo sapiens
tacggtgtggacatctgg

SEQ ID NO: 7553 - DNA, 26 bp, Homo sapiens
actactactatggtatggacgtctgg

SEQ ID NO: 7554 - DNA, 18 bp, Homo sapiens
tacggtatggacgtctgg

SEQ ID NO: 7555 - DNA, 14 bp, Homo sapiens
actttgactactgg

SEQ ID NO: 7556 - DNA, 12 bp, Homo sapiens
tttgactcctgg

SEQ ID NO: 7557 - DNA, 26 bp, Homo sapiens
acttctactacgctatggacgtctgg

SEQ ID NO: 7558 - DNA, 12 bp, Homo sapiens
ttcgatctctgg

SEQ ID NO: 7559 - DNA, 12 bp, Homo sapiens
tttgatctttgg

SEQ ID NO: 7560 - DNA, 17 bp, Homo sapiens
actactttgacttctgg

SEQ ID NO: 7561 - DNA, 27 bp, Homo sapiens
tactactactactactcggacgtctgg

SEQ ID NO: 7562 - DNA, 12 bp, Homo sapiens
tttgacacctgg

SEQ ID NO: 7563 - DNA, 17 bp, Homo sapiens
ggtacttcgatctctgg

SEQ ID NO: 7564 - DNA, 17 bp, Homo sapiens
actactttgactactgg

SEQ ID NO: 7565 - DNA, 17 bp, Homo sapiens
actactttgactactgg

SEQ ID NO: 7566 - DNA, 11 bp, Homo sapiens
ttgactcctgg

SEQ ID NO: 7567 - DNA, 26 bp, Homo sapiens
actactactacggtatggacgtctgg

SEQ ID NO: 7568 - DNA, 15 bp, Homo sapiens
tactttgactactgg

SEQ ID NO: 7569 - DNA, 14 bp, Homo sapiens
ggttcgacccctgg

SEQ ID NO: 7570 - DNA, 32 bp, Homo sapiens
atttctactactactacggtatggacgtctgg

SEQ ID NO: 7571 - DNA, 17 bp, Homo sapiens
actactttgactactgg

SEQ ID NO: 7572 - DNA, 18 bp, Homo sapiens
tggtacttcgatctctgg

SEQ ID NO: 7573 - DNA, 12 bp, Homo sapiens
tttgactactgg

SEQ ID NO: 7574 - DNA, 15 bp, Homo sapiens
tggttcgacccctgg

SEQ ID NO: 7575 - DNA, 15 bp, Homo sapiens
tactttgactactgg

SEQ ID NO: 7576 - DNA, 17 bp, Homo sapiens
acgacatggacgtctgg

SEQ ID NO: 7577 - DNA, 17 bp, Homo sapiens
actggttcgacccctgg

SEQ ID NO: 7578 - DNA, 32 bp, Homo sapiens
attactactactactactacatggacgtctgg

SEQ ID NO: 7579 - DNA, 21 bp, Homo sapiens
tactggtacttcgatctctgg

SEQ ID NO: 7580 - DNA, 21 bp, Homo sapiens
  modified_base (17)..(17): a, c, t, g, unknown or other
tattacggtatggacgnctgg

SEQ ID NO: 7581 - DNA, 20 bp, Homo sapiens
acaactggttcgacccctgg

SEQ ID NO: 7582 - DNA, 20 bp, Homo sapiens
actattatatggacgtctgg

SEQ ID NO: 7583 - DNA, 15 bp, Homo sapiens
tggttcgacccctgg

SEQ ID NO: 7584 - DNA, 18 bp, Homo sapiens
tacggtatggacgtctgg

SEQ ID NO: 7585 - DNA, 18 bp, Homo sapiens
tactacatggacgtctgg

SEQ ID NO: 7586 - DNA, 13 bp, Homo sapiens
ctttgactcctgg

SEQ ID NO: 7587 - DNA, 31 bp, Homo sapiens
ttactactactactacggtatggacgtctgg

SEQ ID NO: 7588 - DNA, 14 bp, Homo sapiens
ggttcgacccctgg

SEQ ID NO: 7589 - DNA, 13 bp, Homo sapiens
catggacgtctgg

SEQ ID NO: 7590 - DNA, 12 bp, Homo sapiens
tttcactactgg

SEQ ID NO: 7591 - DNA, 11 bp, Homo sapiens
ttgactcctgg

SEQ ID NO: 7592 - DNA, 15 bp, Homo sapiens
tactttgactactgg

SEQ ID NO: 7593 - DNA, 12 bp, Homo sapiens
tttgactactgg

SEQ ID NO: 7594 - DNA, 21 bp, Homo sapiens
gctgaatacttccagcactgg

SEQ ID NO: 7595 - DNA, 27 bp, Homo sapiens
tactactactactacatggacgtctgg

SEQ ID NO: 7596 - DNA, 15 bp, Homo sapiens
gcttttgatatctgg

SEQ ID NO: 7597 - DNA, 21 bp, Homo sapiens
tactacttcatggacgtctgg

SEQ ID NO: 7598 - DNA, 13 bp, Homo sapiens
ctttgactactgg

SEQ ID NO: 7599 - DNA, 13 bp, Homo sapiens
ctttgactactgg

SEQ ID NO: 7600 - DNA, 20 bp, Homo sapiens
actggtacttcgatctctgg

SEQ ID NO: 7601 - DNA, 12 bp, Homo sapiens
tttgactactgg

SEQ ID NO: 7602 - DNA, 15 bp, Homo sapiens
tacttggacgtctgg

SEQ ID NO: 7603 - DNA, 17 bp, Homo sapiens
actactttgactactgg

SEQ ID NO: 7604 - DNA, 21 bp, Homo sapiens
tactactacatggacgtctgg

SEQ ID NO: 7605 - DNA, 21 bp, Homo sapiens
tactactacatggacgtctgg

SEQ ID NO: 7606 - DNA, 17 bp, Homo sapiens
actactttgactactgg

SEQ ID NO: 7607 - DNA, 16 bp, Homo sapiens
ctggttcgacccctgg

SEQ ID NO: 7608 - DNA, 17 bp, Homo sapiens
actactttgactactgg

SEQ ID NO: 7609 - DNA, 15 bp, Homo sapiens
tggttcgacccctgg

SEQ ID NO: 7610 - DNA, 15 bp, Homo sapiens
tactttgactactgg

SEQ ID NO: 7611 - DNA, 27 bp, Homo sapiens
tactactactactacatggacgtctgg

SEQ ID NO: 7612 - DNA, 10 bp, Homo sapiens
tgactactgg

SEQ ID NO: 7613 - DNA, 12 bp, Homo sapiens
tttgactactgg

SEQ ID NO: 7614 - DNA, 13 bp, Homo sapiens
ctttgactactgg

SEQ ID NO: 7615 - DNA, 14 bp, Homo sapiens
actttggctactgg

SEQ ID NO: 7616 - DNA, 14 bp, Homo sapiens
ggttcgacccgtgg

SEQ ID NO: 7617 - DNA, 17 bp, Homo sapiens
actactttgactactgg

SEQ ID NO: 7618 - DNA, 10 bp, Homo sapiens
tgactactgg

SEQ ID NO: 7619 - DNA, 18 bp, Homo sapiens
gattattttgatgtctgg

SEQ ID NO: 7620 - DNA, 27 bp, Homo sapiens
tactactactacggtatggacgtctgg

SEQ ID NO: 7621 - DNA, 17 bp, Homo sapiens
actactttgactactgg

SEQ ID NO: 7622 - DNA, 12 bp, Homo sapiens
tttgactactgg

SEQ ID NO: 7623 - DNA, 21 bp, Homo sapiens
tactactacatggacgtctgg

SEQ ID NO: 7624 - DNA, 11 bp, Homo sapiens
ttgactactgg

SEQ ID NO: 7625 - DNA, 17 bp, Homo sapiens
actactttgactactgg

SEQ ID NO: 7626 - DNA, 28 bp, Homo sapiens
ctactactactactacatggacgtctgg

SEQ ID NO: 7627 - DNA, 13 bp, Homo sapiens
ctttgactactgg

SEQ ID NO: 7628 - DNA, 17 bp, Homo sapiens
actactttgactactgg

SEQ ID NO: 7629 - DNA, 15 bp, Homo sapiens
tggtttgacttctgg

SEQ ID NO: 7630 - DNA, 17 bp, Homo sapiens
actactttgactactgg

SEQ ID NO: 7631 - DNA, 15 bp, Homo sapiens
tactttgactactgg

SEQ ID NO: 7632 - DNA, 62 bp, Homo sapiens
gtattactatgagtcatacctccaacactggggccagggcaccctggtcaccgtctcctcag

SEQ ID NO: 7633 - DNA, 65 bp, Homo sapiens
tgggtgatgttgttcactacggtctggacgtctggggcaaagggaccccggtcatcgtctcctca

SEQ ID NO: 7634 - DNA, 80 bp, Homo sapiens
ggggaacaatcggtcctttttcttactactactactacatggacgtctggggcaaggggaccacggtcaccgtctcctca

SEQ ID NO: 7635 - DNA, 56 bp, Homo sapiens
tatggaatacgcctttgactcctggggccagggaaccctggtcgccgtcacctcag

SEQ ID NO: 7636 - DNA, 72 bp, Homo sapiens
gtggatacaactatggtgcgaagatgtactttgacttctggggccagggaatccgggtcaccgtctcctcag

SEQ ID NO: 7637 - DNA, 60 bp, Homo sapiens
gtggtggtctcacttgtcttgacttttggggccagggaaccttggtcaccgtctcctcag

SEQ ID NO: 7638 - DNA, 68 bp, Homo sapiens
catttttggagacgtccggtactggttcgacccctggggccagggagccctggtcaccgtctcctcag

SEQ ID NO: 7639 - DNA, 68 bp, Homo sapiens
tataatcacagctggttcgtccacctttgactactggggccagggaaccctggtcaccgtctcctcag

SEQ ID NO: 7640 - DNA, 74 bp, Homo sapiens
tattacgatttttggagtggccaggtggacgtttgattcttggggccagggaaccctggtcaccgtctcctcag

SEQ ID NO: 7641 - DNA, 75 bp, Homo sapiens
ttattttgatagtagtacttattatgacggtgatggtttcgacttctggggacaagggacaatggtcaccgtctc

SEQ ID NO: 7642 - DNA, 80 bp, Homo sapiens
ggggaacaatcggtcctttttcctactactactactacatggacgtctggggcaaagggaccacggtcaccgtctcctca

SEQ ID NO: 7643 - DNA, 77 bp, Homo sapiens
atggttcgggatgtctttatacgccgcccgcagttttgatgtgtggggccaagggacactggtcaccgtctcctcag

SEQ ID NO: 7644 - DNA, 51 bp, Homo sapiens
accgtggtgcagagcactggggccacggaaccctggtcaccgtctcctcag

SEQ ID NO: 7645 - DNA, 72 bp, Homo sapiens
gtggcggtggtaatgccttctactggtacttcgatctctggggccgtggcaccctggtcaccgtctcctcag

SEQ ID NO: 7646 - DNA, 79 bp, Homo sapiens
attacgatttatggagtgcttgttaccagaaactggctcgacccctggggccagggatccctggtcaccgtctcctcag

SEQ ID NO: 7647 - DNA, 75 bp, Homo sapiens
attgtactaatggtgtatgctatacccggcactttgactactggggccagggaaccctggtcaccgtctcctcag

SEQ ID NO: 7648 - DNA, 55 bp, Homo sapiens
gggggagactactttaaccactggggccagggaagcctggtcaccgtctcctcag

SEQ ID NO: 7649 - DNA, 78 bp, Homo sapiens
acgattgttttagtttcggctgtccacactggtacctcgatctctggggccgtggcgtcctggtcaccgtctcctcag

SEQ ID NO: 7650 - DNA, 109 bp, Homo sapiens
tattgtagtagtaccagctgccccacgagaattatactactcccctgggggctactactactactacatggacgtctggggcaaagggaccacggtcaccgtctcctca

SEQ ID NO: 7651 - DNA, 59 bp, Homo sapiens
tcggggtattgatgcttttgatatctggggccaagggacaatggtcaccgtctcttcag

SEQ ID NO: 7652 - DNA, 75 bp, Homo sapiens
attgttatagtaccgcctgtccacactggtacttcgatctctggggccgtggcgccctggtcaccgtctcctcag

SEQ ID NO: 7653 - DNA, 66 bp, Homo sapiens
tgtaccagtgccagctgccataaaatggacgtctggggcagagggactacggtcaccgtctcctca

SEQ ID NO: 7654 - DNA, 73 bp, Homo sapiens
gtggggaatcgaggaccaacctcctactactttgactactggggccagggaaccctggtcaccgtctcctcag

SEQ ID NO: 7655 - DNA, 64 bp, Homo sapiens
agtgatggttattactacgtctttgactcttggggccagggaaccctggtcaccgtctcctcag

SEQ ID NO: 7656 - DNA, 53 bp, Homo sapiens
gactataatccccactttgcctcctggggccacggaaccctggtcaccgtctc

SEQ ID NO: 7657 - DNA, 55 bp, Homo sapiens
ggaactagcggttatgactactggggccagggaaccctggtcaccgtctcctcag

SEQ ID NO: 7658 - DNA, 60 bp, Homo sapiens
gtggtcctaggtgaagcccttgcctactggggccagggagccctggtcaccgtctcctca

SEQ ID NO: 7659 - DNA, 82 bp, Homo sapiens
actaatggtctaacaggaccagcctatgtcaatgcagagtttgaattctggggccagggaaccctggtcaccgtttcctcag

SEQ ID NO: 7660 - DNA, 88 bp, Homo sapiens
gggtatgccagtggctggttggcccctttcgggccagtaggacacttgagccactggggccagggaaccctggtcaccgtctcctcag

SEQ ID NO: 7661 - DNA, 63 bp, Homo sapiens
ctaactggggatggacgggaatgccctactggggccggggaaccctggtcaccgtctcctcag

SEQ ID NO: 7662 - DNA, 59 bp, Homo sapiens
cggtggttcacggtcttttgatatctggggccaagggacaatggtcaccgtctcttcag

SEQ ID NO: 7663 - DNA, 82 bp, Homo sapiens
tgacaacgatgactccgacgggttggggtactactacggtctggacgtctggggcatagggaccacggtcaccgtctcctca

SEQ ID NO: 7664 - DNA, 69 bp, Homo sapiens
cgatttttggagtcgtccgccactgtttcgacccctggggccagggaacccaggtcatcgtctcctcag

SEQ ID NO: 7665 - DNA, 75 bp, Homo sapiens
gggagggctatgccggtgttccgacacccaactggttcgacccctggggccagggaaccctggtcatcgtctcct

SEQ ID NO: 7666 - DNA, 57 bp, Homo sapiens
tggatgggggatattttgactactgggtccagggaactctggtcaccgtctcctcag

SEQ ID NO: 7667 - DNA, 75 bp, Homo sapiens; identical to SEQ ID NO: 7665

SEQ ID NO: 7668 - DNA, 55 bp, Homo sapiens
gtacagtgggactttgactactggggccagggaaccctggtcagcgtctcatcag

SEQ ID NO: 7669 - DNA, 60 bp, Homo sapiens
ggggggtatggttcgggtccctcaggtggggccggggcaccctggtcaccgtctcctcag

SEQ ID NO: 7670 - DNA, 85 bp, Homo sapiens
ttgtagtggtggtacctgctactcgtttcgttcctactactacatggacgtctggggcaaagggaccacggtcaccgtctcctca

SEQ ID NO: 7671 - DNA, 55 bp, Homo sapiens
agagatgcctacagtgactattggggccagggaacctgggtcaccgtctcctcag

SEQ ID NO: 7672 - DNA, 61 bp, Homo sapiens
cgatattttgggttttaccttgactcctggggccagggaacccaggtcaccgtctcctcag

SEQ ID NO: 7673 - DNA, 67 bp, Homo sapiens
tagtccgggctacttcttttacggtatggacgtctggggccaagggaccacggtcaccgtctcctca

SEQ ID NO: 7674 - DNA, 70 bp, Homo sapiens
  modified_base (44)..(44): a, c, t, g, unknown or other
  modified_base (64)..(64): a, c, t, g, unknown or other
tggggtggcttttagtggcctcctactactttgaccactggggncagggaaccctgctcaccgnctcctc

SEQ ID NO: 7675 - DNA, 80 bp, Homo sapiens
ttgtactaatggtgcatgctatgagggggcatactactttgacaactggggccagggaaccctggtcaccgtctcctcag

SEQ ID NO: 7676 - DNA, 90 bp, Homo sapiens
ggatacagttctgggtacgatgatgtcgccggctactactggtacactatggacgtctggggccaagggaccacggtcaccgtctcctca

SEQ ID NO: 7677 - DNA, 71 bp, Homo sapiens
gtataactgcaaccaggtattactacggtatggacgtctggggccgagggaccacggtcgccgtctcctca

SEQ ID NO: 7678 - DNA, 60 bp, Homo sapiens
gttcagggagggctccttttgacacctggggccaagggacagcagtcgtcgtctcttcag

SEQ ID NO: 7679 - DNA, 64 bp, Homo sapiens
tataacgatttttggagccaaccccccggactactggggccagggaaccctggtcaccgtctcc

SEQ ID NO: 7680 - DNA, 71 bp, Homo sapiens
gtggatatagttcctacgacaagggggactttgactactggggccagggaaccctggtcaccgtctcctca

SEQ ID NO: 7681 - DNA, 77 bp, Homo sapiens
taatacgatttttggagtggtcatcccgaggtacttcgatctctggggccgtggcaccctggtcactgtctcctcag

SEQ ID NO: 7682 - DNA, 61 bp, Homo sapiens
tacgctggttcggggagttttgactcctggggccagggaaccctggtcaccgtctcctcag

SEQ ID NO: 7683 - DNA, 61 bp, Homo sapiens
agtggttatttctacgctttacacttctggggccagggaaccctggtcaccgtctcctcag

SEQ ID NO: 7684 - DNA, 63 bp, Homo sapiens
tagcaacacctggtagaggggttgactattggggccagggcaccctggtcaccgtctcctcag

SEQ ID NO: 7685 - DNA, 61 bp, Homo sapiens
tattctggttcggggacttttgactactggggccagggaaccctggtcaccgtctcctcag

SEQ ID NO: 7686 - DNA, 64 bp, Homo sapiens
tacagaagctcgtcgggttattgggagtactggggccagggaaccctggtcaccgtctcctcag

SEQ ID NO: 7687 - DNA, 61 bp, Homo sapiens
tatggctcggggagttattcgcagtactggggccagggaaccctggtcaccgtctcctcag

SEQ ID NO: 7688 - DNA, 62 bp, Homo sapiens
tgactatggtgaagatccttttgatatctggggccaagggacaatggtcaccgtctcttcag

SEQ ID NO: 7689 - DNA, 61 bp, Homo sapiens
cgttattttgggttttatcttgactcctggggcccgggaacccacgtcaccgtctcctcag

SEQ ID NO: 7690 - DNA, 59 bp, Homo sapiens
tatggcccgagccgtactactttgactcctggggccagggaaccctggtcaccgtctcc

SEQ ID NO: 7691 - DNA, 61 bp, Homo sapiens
gatagtagtggttattaccttgactcctggggccagggaaccctggtcaccgtctcctcag

SEQ ID NO: 7692 - DNA, 76 bp, Homo sapiens
tgcagcagtaccagctgctcgggaggcagttggttcgacccctggggccagggcactctggtcaccgtctcctcag

SEQ ID NO: 7693 - DNA, 63 bp, Homo sapiens
atcgggatagtgacgacctactttgaatactggggccagggaaccctggtcgccgtctcctca

SEQ ID NO: 7694 - DNA, 69 bp, Homo sapiens
gggatgttcttgtagctcagggagccatcgggtactggggccagggaaccctgctcaccgtctccttag

SEQ ID NO: 7695 - DNA, 64 bp, Homo sapiens
tatagcaccacctggcactatttcgacccctggggccagggaaccctggtcaccgtctcctcag

SEQ ID NO: 7696 - DNA, 71 bp, Homo sapiens
ggaagctacaacgacacgggggaggtggttcgacccctggggccagggaaccctggtcaccgtctcctcag

SEQ ID NO: 7697 - DNA, 77 bp, Homo sapiens
gggatagtgggagctcacactgctactactactacatggatgtctggggcaaagggaccacggtcaccgtctcctca

SEQ ID NO: 7698 - DNA, 68 bp, Homo sapiens
ttcgggggactttgcggaggggcactggctcgacccctggggccagggaacgctggtcaccgtctcct

SEQ ID NO: 7699 - DNA, 68 bp, Homo sapiens
atagcagtccctttttcgactatggtatggacgtctggggccacgggaccacggtcaccgtctcctca

SEQ ID NO: 7700 - DNA, 51 bp, Homo sapiens
ctacagtaaaaggtttgtggggccagggaaccctggtcaccgtctcttcag

SEQ ID NO: 7701 - DNA, 75 bp, Homo sapiens
ggatacagttatggttactttgttccttactactttgactactggggccagggaaccctggtcaccgtctcctca

SEQ ID NO: 7702 - DNA, 60 bp, Homo sapiens
ctttacttcggggacttatatcgactactggggccagggatccctggtccccgtctcctc

SEQ ID NO: 7703 - DNA, 66 bp, Homo sapiens
acgattttcggagtggttttccccttgattactggggccagggaaccctggtcaccgtctcctcag

SEQ ID NO: 7704 - DNA, 87 bp, Homo sapiens
attgtagtattaccacctgtcgcgttccaaatcaggaccatgcttttgatatctggggccaggggacgatggtcatcatctcttcag

SEQ ID NO: 7705 - DNA, 63 bp, Homo sapiens
atggtaatgatggttattttcttgactactggggccagggaaccctggtcaccgtctcctcag

SEQ ID NO: 7706 - DNA, 56 bp, Homo sapiens
tgactggctatggtactttgacgtctggggcccggggatcccggtcactgtctcct

SEQ ID NO: 7707 - DNA, 73 bp, Homo sapiens
tggcccgggtaattacttctactacttcttcatggacgtctggggcaaagggaccacggtcaccgtcgcctca

SEQ ID NO: 7708 - DNA, 57 bp, Homo sapiens
actacggccaccgggatggacgtctggggcaaagggaccacggtcaccgtctcctca

SEQ ID NO: 7709 - DNA, 58 bp, Homo sapiens
agaaggagttggtacgtggactattggggccacggaaccctggtcaccgtctcgtcag

SEQ ID NO: 7710 - DNA, 48 bp, Homo sapiens
gagaccctgactactggggccagggaaccctcgtcaccgtctcctcag

SEQ ID NO: 7711 - DNA, 69 bp, Homo sapiens
gcagctcgcccgaccccctttactactttgactactggggccagggaaccccggtcaccgtctcctcag

SEQ ID NO: 7712 - DNA, 52 bp, Homo sapiens
gtttttggagttggcccctggggccagggaaccctggtcaccgtctcctcag

SEQ ID NO: 7713 - DNA, 61 bp, Homo sapiens
attactattactatcacggtatggacgtctggggccaagggaccacggtcatcgtctcctc

SEQ ID NO: 7714 - DNA, 68 bp, Homo sapiens
ggcctcaattactattactatcacggcatggacgtctggggccaagggaccacggtcatcgtctcctc

SEQ ID NO: 7715 - DNA, 67 bp, Homo sapiens
ggtgtaatgcttattaagtactactttgacttctggggccagggaaccctggtcaccgtctcctcag

SEQ ID NO: 7716 - DNA, 60 bp, Homo sapiens
cgctttttggcctacggtatggacgtctggggccaagggaccacggtcaccgtctcctca

SEQ ID NO: 7717 - DNA, 36 bp, Homo sapiens
ggttttgtgggacctcttgcctactggggccaggga

SEQ ID NO: 7718 - DNA, 58 bp, Homo sapiens
gggggcgatactgaggtgcgatactggggccagggaaccctggtcaccgtctcctcag

SEQ ID NO: 7719 - DNA, 70 bp, Homo sapiens
tggatacagctctaataccccggcgtactttgattactggggccagggaaccctggtcaccgtctcgtca

SEQ ID NO: 7720 - DNA, 65 bp, Homo sapiens
ttacgatcttttgactggtttgtttgactcctggggccagggaaccctggtcaccgtctcctcag

SEQ ID NO: 7721 - DNA, 57 bp, Homo sapiens
agggggggctacaaaatgactactggggccagggaaccctggtcaccgtctcctcag

SEQ ID NO: 7722 - DNA, 62 bp, Homo sapiens
ttgtatcccgttccttcgttatggacgtctggggccacgggaccacggtcaccgtctcctca

SEQ ID NO: 7723 - DNA, 67 bp, Homo sapiens
gaaagaggaatggttactctggccccattgactcctggggccagggaaccctggtcaccgtctcctc

SEQ ID NO: 7724 - DNA, 63 bp, Homo sapiens
gtatttccaagaaaaatgcttttgatatttggggccaagggacactggtcaccgtctcttcag

SEQ ID NO: 7725 - DNA, 67 bp, Homo sapiens
tacggtgactacgaccggaatgcttttgacatctggggccaagggacaatggtcaccgtctcttcag

SEQ ID NO: 7726 - DNA, 65 bp, Homo sapiens
gtcggaactactacgtggactactttgactactggggccagggaagcctggtcaccgtctcctca

SEQ ID NO: 7727 - DNA, 62 bp, Homo sapiens
attactattattatcatggaatggacgtctggggccaagggaccacggtcatcgtctcctca

SEQ ID NO: 7728 - DNA, 65 bp, Homo sapiens
tatagtgcctactaattactattatgacttctggggccagggaacccaggttaacgtctcttcag

SEQ ID NO: 7729 - DNA, 58 bp, Homo sapiens
ggtggcagctcttcctttgactactggggccagggaaccctggtcaccgtctcctcag

SEQ ID NO: 7730 - DNA, 77 bp, Homo sapiens
ttgtggtggtctctgctattcctcggactggtacttcgatgtctggggccgtggcaccctggtcactgtgtcctcag

SEQ ID NO: 7731 - DNA, 50 bp, Homo sapiens
attactacttttatcacggtatggacctctggggccaagggaccacggtc

SEQ ID NO: 7732 - DNA, 53 bp, Homo sapiens
tgaattattattattaccacggaatggacgtttggggcctagggaccacggtc

SEQ ID NO: 7733 - DNA, 78 bp, Homo sapiens
acggtgactacctcactttatttctattaccacggaatggacgtctggggccaagggaccacggtcaccgtctcctca

SEQ ID NO: 7734 - DNA, 61 bp, Homo sapiens
tacagtgactacgtctactttgagtcctggggccagggagccccggtcaccgtctcttcag

SEQ ID NO: 7735 - DNA, 79 bp, Homo sapiens
ggggagttatggtgacacctatcactcctattacggtatggacgtctggggccaagggaccacggtcaccgtctcctca

SEQ ID NO: 7736 - DNA, 64 bp, Homo sapiens
agcacctcgtccgggcactactttgactactggggccagggaaccctggtcaccgtctcctcag

SEQ ID NO: 7737 - DNA, 61 bp, Homo sapiens
agttatgctctccccccccgtgactactggggccagggaaccctggtcaccgtctcctcag

SEQ ID NO: 7738 - DNA, 63 bp, Homo sapiens
gggggtggctacaatcggactttgacatctggggccagggagccctggtcaccgtgtcctcag

SEQ ID NO: 7739 - DNA, 88 bp, Homo sapiens
tagcagtggctggcccagcgaccgctatttccaccactactccgggttggacgtctggggccaagggaccacggtcaccgtctccgca

SEQ ID NO: 7740 - DNA, 53 bp, Homo sapiens
tacaagcacgactaacttttggggccggggaaccctggtcaccgtctcctcgg

SEQ ID NO: 7741 - DNA, 63 bp, Homo sapiens
attgtactagtaccagctgttatgtccactggggccagggaaccctggtcaccgtctcctcag

SEQ ID NO: 7742 - DNA, 78 bp, Homo sapiens
tgaatacggcgaccgcttctcggtccccaactggtatttcgatctctggggccgtggcacccaggtcactgtctcctc

SEQ ID NO: 7743 - DNA, 67 bp, Homo sapiens
tagccgtggctgacggaagggatgcttttgatatctggggccaggggactatggtcatcgtctcttc

SEQ ID NO: 7744 - DNA, 77 bp, Homo sapiens
tattacgatttttggacttctcaggccggggtggttcggctcctggggccagggaaccctggtcaccgtctcctcag

SEQ ID NO: 7745 - DNA, 79 bp, Homo sapiens
ggggagctatggtgacacctatcactcctactacgctatggacgtctggggccaagggaccacggtcaccgtctcctca

SEQ ID NO: 7746 - DNA, 80 bp, Homo sapiens
  modified_base (46)..(46): a, c, t, g, unknown or other
  modified_base (55)..(55): a, c, t, g, unknown or other
tgagtacggtgaccgcttctcggtcccctactggtacttcgatctntggggccgnggcaccctggtcactgtctcctcag

SEQ ID NO: 7747 - DNA, 62 bp, Homo sapiens
cttttcccccgcatattattttgagtactggggccagggaaccctggtcaccgtctcctcag

SEQ ID NO: 7748 - DNA, 64 bp, Homo sapiens
gcggtcagtgggcaatggtacttcgatctctggggccgtggaaccctggtcaccgtctcctcag

SEQ ID NO: 7749 - DNA, 66 bp, Homo sapiens
tagtctttattacgccaacgataaattatacctggggccacggaaccctggtcaccgtctcctcag

SEQ ID NO: 7750 - DNA, 75 bp, Homo sapiens
gcactggcttgaacgggggagacttccaatacggtgtggacatctggggccaagggaccacggtcaccgtctcct

SEQ ID NO: 7751 - DNA, 73 bp, Homo sapiens
accacctggggtgccacactactactatggtatggacgtctggggccaagggaccacggtcaccgtctcctca

SEQ ID NO: 7752 - DNA, 57 bp, Homo sapiens
cctgaatcactattcccctaggccatcctcctggggccagggaaccctggtcaccgt

SEQ ID NO: 7753 - DNA, 60 bp, Homo sapiens
gtatagttttgtttacggtatggacgtctggggccaagggaccacggtcaccgtctcctc

SEQ ID NO: 7754 - DNA, 61 bp, Homo sapiens
tataacagtggctggcactttgactactggggccagggaaccctggtcaccgtctcctcag

SEQ ID NO: 7755 - DNA, 51 bp, Homo sapiens
actggagattttgactcctggggccagggaaccctggtctccgtctcctca

SEQ ID NO: 7756 - DNA, 75 bp, Homo sapiens
catattgtagaggaaacaactgctatggagccccaaactactggggccaaggaacccaggtcaccgtctcctcag

SEQ ID NO: 7757 - DNA, 78 bp, Homo sapiens
ggggagctatggtgacacctatcacttctactacgctatggacgtctggggccaagggaccacggtcaccgtctcctc

SEQ ID NO: 7758 - DNA, 50 bp, Homo sapiens
acagtctttcgatctctggggccgtggcaccctggtcaccgtctcctcag

SEQ ID NO: 7759 - DNA, 60 bp, Homo sapiens
tgcctggaatttatgcctttgatctttggggccaagggacaatggtcaccgtctcttcag

SEQ ID NO: 7760 - DNA, 72 bp, Homo sapiens
gtggatacagctttgattactcggactactttgacttctggggccagggaaccctggtcaccgtctcctcag

SEQ ID NO: 7761 - DNA, 71 bp, Homo sapiens
taccgccggtcccttactactactactactcggacgtctggggcaaagggaccacggtcaccgtctcctca

SEQ ID NO: 7762 - DNA, 78 bp, Homo sapiens
gtgtttcgatttttggattacttctgccaggggagtttgacacctggggccagggagccctggtcaccgtctcctcag

SEQ ID NO: 7763 - DNA, 79 bp, Homo sapiens
tattgtagtagtaccagctgctatcccgtcgggtacttcgatctctggggccgtggcaccctggtcaccgtctcctcag

SEQ ID NO: 7764 - DNA, 82 bp, Homo sapiens
tattactatgatagtagtggttttccagtcctctactactttgactactggggccagggaaccctggtcaccgtctcctcag

SEQ ID NO: 7765 - DNA, 63 bp, Homo sapiens
ggggtgatacgctctactactttgactactggggccagggaaccctggtcaccgtctcctcag

SEQ ID NO: 7766 - DNA, 61 bp, Homo sapiens
aactggggatcttggttccttgactcctggggccagggaaccctggtcaccgtctcctcag

SEQ ID NO: 7767 - DNA, 81 bp, Homo sapiens
tacgatttttggagtggttattataactactactacggtatggacgtctggggccaagggaccacggtcaccgtctcctca

SEQ ID NO: 7768 - DNA, 73 bp, Homo sapiens
gcatattgtggtggtgactgctattcatactttgactactggggccagggaaccctggtcaccgtctcctcag

SEQ ID NO: 7769 - DNA, 68 bp, Homo sapiens
ggtgggaaccccgatttttcgcagcggttcgacccctggggccagggagccctggtcaccgtctcctc

SEQ ID NO: 7770 - DNA, 86 bp, Homo sapiens
atacagctatggttacgaccccgtatttctactactactacggtatggacgtctggggccaagggaccacggtcaccgtctcctca

SEQ ID NO: 7771 - DNA, 75 bp, Homo sapiens
acgatttttggagtggttattgggggtactactttgactactggggccagggaaccctggtcaccgtctcctcag

SEQ ID NO: 7772 - DNA, 78 bp, Homo sapiens
agtgggagctactcggtccttctacttggtggtacttcgatctctggggccgtggcaccctggtcactgtctcctcag

SEQ ID NO: 7773 - DNA, 49 bp, Homo sapiens
gtgggagctactttgactggggccagggaaccctggtcaccgtctcctc

SEQ ID NO: 7774 - DNA, 66 bp, Homo sapiens
ggtataactggaactatcacccatttgactactggggccagggaaccctggtcaccgtctcctcag

SEQ ID NO: 7775 - DNA, 66 bp, Homo sapiens
actacggtgactacgtagagtggttcgacccctggggccagggaaccctggtcaccgtctcctcag

SEQ ID NO: 7776 - DNA, 57 bp, Homo sapiens; identical to SEQ ID NO: 2240

SEQ ID NO: 7777 - DNA, 64 bp, Homo sapiens
taatttgggctactctaacgacatggacgtctggggccaagggaccacggtcatcgtctcctca

SEQ ID NO: 7778 - DNA, 79 bp, Homo sapiens
ttcggggagttatttgtggcgggatctcccgtactggttcgacccctggggccagggaaccctggtcaccgtctcctca

SEQ ID NO: 7779 - DNA, 92 bp, Homo sapiens
ggcatagcagcaggtggcgagacacgggctattactactactactactacatggacgtctggggcaaagggaccacggtcaccgtctcctca

SEQ ID NO: 7780 - DNA, 70 bp, Homo sapiens
gcagctcgagggtcggagtactggtacttcgatctctggggccgtggcaccctggtcactgtctcctcag

SEQ ID NO: 7781 - DNA, 83 bp, Homo sapiens
  modified_base (49)..(49): a, c, t, g, unknown or other
attactatgatagtagtggttactccacggagtattacggtatggacgnctggggccaagggaccacggtcaccgtctcctca

SEQ ID NO: 7782 - DNA, 72 bp, Homo sapiens
ttgtactaatggtgtatgctatacattcgcctgggtactggggccagggaaccctggtcaccgtctcctcag

SEQ ID NO: 7783 - DNA, 41 bp, Homo sapiens
cggtgacttgagccagggaaccctggtcaccgtctcctcag

SEQ ID NO: 7784 - DNA, 71 bp, Homo sapiens
tagcagcagctgggagttttacaactggttcgacccctggggccagggaaccctggtcaccgtctcctcag

SEQ ID NO: 7785 - DNA, 67 bp, Homo sapiens
attgatggtggacctcgactattatatggacgtctggggcaaagggaccacggtcaccgtctcctca

SEQ ID NO: 7786 - DNA, 67 bp, Homo sapiens
tacagtaacgctcagctatgttggttcgacccctggggccagggaaccctggtcaccgtctcctcag

SEQ ID NO: 7787 - DNA, 62 bp, Homo sapiens
gatacagctctttatacggtatggacgtctggggccaagggaccacggtcaccgtctcctca

SEQ ID NO: 7788 - DNA, 74 bp, Homo sapiens
attacgatattttgactcgtagttcatactacatggacgtctggggcaaagggaccacggtcaccgtctcctca

SEQ ID NO: 7789 - DNA, 63 bp, Homo sapiens
tgactacagtaactatcgattctttgactcctggggccgggggaccctggtcaccgtctcctc

SEQ ID NO: 7790 - DNA, 94 bp, Homo sapiens
aggatattgtagtagtaccagctgctatagaacttactactactactacggtatggacgtctggggccaagggaccacggtcaccgtctcctca

SEQ ID NO: 7791 - DNA, 59 bp, Homo sapiens
atcgtggtcgtccaggttcgacccctggggccagggaaccctggtcaccgtctcctcag

SEQ ID NO: 7792 - DNA, 55 bp, Homo sapiens
ggtacggtggggtttcactactggggccagggaaccctggtcaccgtctcctcag

SEQ ID NO: 7793 - DNA, 60 bp, Homo sapiens
actacggtgactacttcgttgactcctggggccagggaaccctggtcaccgtctcctcag

SEQ ID NO: 7794 - DNA, 54 bp, Homo sapiens
gtactacgtactttgactactggggccagggaaccctggtcaccgtctcctcag

SEQ ID NO: 7795 - DNA, 66 bp, Homo sapiens; identical to SEQ ID NO: 7774

SEQ ID NO: 7796 - DNA, 68 bp, Homo sapiens
tggaggggatgaattcgctgaatacttccagcactggggccagggcaccctggtcaccgtctcctcag

SEQ ID NO: 7797 - DNA, 83 bp, Homo sapiens
aagtgggactacgcgtagttatttcttactactactactacatggacgtctggggcaaagggaccacggtcaccgtctcctca

SEQ ID NO: 7798 - DNA, 67 bp, Homo sapiens
gagtatagcagcttagctggagcttttgatatctggggccaagggacaatggtcaccgtctcttcag

SEQ ID NO: 7799 - DNA, 71 bp, Homo sapiens
ctggggatcttccctacaagtactacttcatggacgtctggggcagagggaccacggtcaccgtctcctca

SEQ ID NO: 7800 - DNA, 64 bp, Homo sapiens
gagtatagtagctcgtccggctttgactactggggccagggaaccctggtcaccgtctcctcag

SEQ ID NO: 7801 - DNA, 74 bp, Homo sapiens
gtattacgatttttggagtggttatttcggtggggactactggggccagggaaccctggtcaccgtctcctcag

SEQ ID NO: 7802 - DNA, 71 bp, Homo sapiens
gtataactggaactccccgtcccccgcctttgactactggggccagggaaccctggtcaccgtctcctcag

SEQ ID NO: 7803 - DNA, 58 bp, Homo sapiens
tagggaaaactggtacttcgatctctggggccgtggcaccctggtcactgtctcctca

SEQ ID NO: 7804 - DNA, 70 bp, Homo sapiens
ggggatagcagtggctggtacgccagatttgactactggggccagggaaccctggtcaccgtctcctcag

SEQ ID NO: 7805 - DNA, 62 bp, Homo sapiens
gggaccccttatcgtggtacttggacgtctggggcaaagggaccacggtcaccgtctcttcc

SEQ ID NO: 7806 - DNA, 66 bp, Homo sapiens
tatttgtacaggacccatactactttgactactggggccagggaaccctggtcaccgtctcctcag

SEQ ID NO: 7807 - DNA, 80 bp, Homo sapiens
acgatttttggagtggttggatcgaagattactactacatggacgtctggggcaaagggaccacggtcaccgtctcctca

SEQ ID NO: 7808 - DNA, 80 bp, Homo sapiens; identical to SEQ ID NO: 7807

SEQ ID NO: 7809 - DNA, 66 bp, Homo sapiens; identical to SEQ ID NO: 7806

SEQ ID NO: 7810 - DNA, 68 bp, Homo sapiens
gtatagtgggagatacttcacctggttcgacccctggggccagggaaccctggtcaccgtctcctcag

SEQ ID NO: 7811 - DNA, 67 bp, Homo sapiens
tttggagtggtcgccccatactactttgactactggggccagggaaccctggtcaccgtctcctcag

SEQ ID NO: 7812 - DNA, 66 bp, Homo sapiens; identical to SEQ ID NO: 7775

SEQ ID NO: 7813 - DNA, 57 bp, Homo sapiens; identical to SEQ ID NO: 2240

SEQ ID NO: 7814 - DNA, 80 bp, Homo sapiens
gtattacgatttttggagtggttattagtgcggcggctatggacgtctggggccaagggaccacggtcaccgtctcctca

SEQ ID NO: 7815 - DNA, 78 bp, Homo sapiens
tacgacacgaaaccaatgacttactactactactacatggacgtctggggcaaagggaccacggtcaccgtctcctca

SEQ ID NO: 7816 - DNA, 73 bp, Homo sapiens
gtattactatggtttggggagaacgaaaacaatgactactggggccagggaaccctggtcaccgtctcctcag

SEQ ID NO: 7817 - DNA, 66 bp, Homo sapiens
gtagtggtggtagctgcttgccttttgactactggggccagggaaccctggtcaccgtctcctcag

SEQ ID NO: 7818 - DNA, 64 bp, Homo sapiens
gagtatagcacctcgtcgtgctttgactactggggccagggaaccctggtcaccgtctcctcag

SEQ ID NO: 7819 - DNA, 57 bp, Homo sapiens
gcagctcgtgggactttggctactggggccagggaaccctggtcaccgtctcctcag

SEQ ID NO: 7820 - DNA, 70 bp, Homo sapiens
ggtgggaaccccgatttttcgcagaggttcgacccgtggggccagggaaccctggtcaccgtctcctcag

SEQ ID NO: 7821 - DNA, 66 bp, Homo sapiens; identical to SEQ ID NO: 7806

SEQ ID NO: 7822 - DNA, 50 bp, Homo sapiens
  modified_base (46)..(46): a, c, t, g, unknown or other
atcggagcatgactactggggccagggaaccctggtcaccgtctcntcag

SEQ ID NO: 7823 - DNA, 64 bp, Homo sapiens
agggagggatacctggattattttgatgtctggggccaagggacaatggtcaccgtctcttcag

SEQ ID NO: 7824 - DNA, 82 bp, Homo sapiens
atatagtggctacgattggtccccattactactactacggtatggacgtctggggccaagggaccacggtcaccgtctcctc

SEQ ID NO: 7825 - DNA, 66 bp, Homo sapiens; identical to SEQ ID NO: 7806

SEQ ID NO: 7826 - DNA, 59 bp, Homo sapiens
ggtgatttcgtcggacagtttgactactggggccagggaaccctggtcaccgtctcctc

SEQ ID NO: 7827 - DNA, 80 bp, Homo sapiens; identical to SEQ ID NO: 7807

SEQ ID NO: 7828 - DNA, 77 bp, Homo sapiens
ttacgatttttggagtggttatcctataaaggttgttgactactggggccagggaaccctggtcaccgtctcctcag

SEQ ID NO: 7829 - DNA, 75 bp, Homo sapiens; identical to SEQ ID NO: 7771

SEQ ID NO: 7830 - DNA, 73 bp, Homo sapiens
gtgggagctacttatctactactactactacatggacgtctggggcaaagggaccacggtcaccgtctcctca

SEQ ID NO: 7831 - DNA, 61 bp, Homo sapiens
tatagcagctcgtccagctttgactactggggccagggaaccctggtcaccgtctcctcag

SEQ ID NO: 7832 - DNA, 58 bp, Homo sapiens
ggctacgagtactactttgactactggggccagggaaccctggtcaccgtctcctcag

SEQ ID NO: 7833 - DNA, 60 bp, Homo sapiens
gtgggacctactcttggtttgacttctggggccagggaaccctggtcaccgtctcctcag

SEQ ID NO: 7834 - DNA, 73 bp, Homo sapiens
gtggatacagctatggttacgtggggggatcaagactactggggccagggaaccctggtcaccgtctcctcag

SEQ ID NO: 7835 - DNA, 66 bp, Homo sapiens; identical to SEQ ID NO: 7806

SEQ ID NO: 7836 - DNA, 83 bp, Homo sapiens
tacgatttttggagtggttattatcccaacccaggtggatactttgactactggggccagggaaccctggtcaccgtctcctc

SEQ ID NO: 7837 - DNA, 47 bp, Homo sapiens
atacctccaacactggggccagggcaccctggtcaccgtctcctcag

SEQ ID NO: 7838 - DNA, 50 bp, Homo sapiens
actacggtctggacgtctggggcaaagggaccccggtcatcgtctcctca

SEQ ID NO: 7839 - DNA, 57 bp, Homo sapiens
tactactactactacatggacgtctggggcaaggggaccacggtcaccgtctcctca

SEQ ID NO: 7840 - DNA, 44 bp, Homo sapiens
ctttgactcctggggccagggaaccctggtcgccgtcacctcag

SEQ ID NO: 7841 - DNA, 46 bp, Homo sapiens
tactttgacttctggggccagggaatccgggtcaccgtctcctcag

SEQ ID NO: 7842 - DNA, 42 bp, Homo sapiens
ttgacttttggggccagggaaccttggtcaccgtctcctcag

SEQ ID NO: 7843 - DNA, 48 bp, Homo sapiens
actggttcgacccctggggccagggagccctggtcaccgtctcctcag

SEQ ID NO: 7844 - DNA, 44 bp, Homo sapiens
ctttgactactggggccagggaaccctggtcaccgtctcctcag

SEQ ID NO: 7845 - DNA, 34 bp, Homo sapiens; identical to SEQ ID NO: 2342

SEQ ID NO: 7846 - DNA, 31 bp, Homo sapiens
tctggggacaagggacaatggtcaccgtctc

SEQ ID NO: 7847 - DNA, 61 bp, Homo sapiens
ttcctactactactactacatggacgtctggggcaaagggaccacggtcaccgtctcctca

SEQ ID NO: 7848 - DNA, 44 bp, Homo sapiens
ttttgatgtgtggggccaagggacactggtcaccgtctcctcag

SEQ ID NO: 7849 - DNA, 40 bp, Homo sapiens
gagcactggggccacggaaccctggtcaccgtctcctcag

SEQ ID NO: 7850 - DNA, 53 bp, Homo sapiens
ctactggtacttcgatctctggggccgtggcaccctggtcaccgtctcctcag

SEQ ID NO: 7851 - DNA, 49 bp, Homo sapiens
aactggctcgacccctggggccagggatccctggtcaccgtctcctcag

SEQ ID NO: 7852 - DNA, 45 bp, Homo sapiens; identical to SEQ ID NO: 2288

SEQ ID NO: 7853 - DNA, 48 bp, Homo sapiens
actactttaaccactggggccagggaagcctggtcaccgtctcctcag

SEQ ID NO: 7854 - DNA, 51 bp, Homo sapiens
actggtacctcgatctctggggccgtggcgtcctggtcaccgtctcctcag

SEQ ID NO: 7855 - DNA, 58 bp, Homo sapiens
ctactactactactacatggacgtctggggcaaagggaccacggtcaccgtctcctca

SEQ ID NO: 7856 - DNA, 50 bp, Homo sapiens
tgatgcttttgatatctggggccaagggacaatggtcaccgtctcttcag

SEQ ID NO: 7857 - DNA, 51 bp, Homo sapiens
actggtacttcgatctctggggccgtggcgccctggtcaccgtctcctcag

SEQ ID NO: 7858 - DNA, 42 bp, Homo sapiens
atggacgtctggggcagagggactacggtcaccgtctcctca

SEQ ID NO: 7859 - DNA, 48 bp, Homo sapiens; identical to SEQ ID NO: 2310

SEQ ID NO: 7860 - DNA, 44 bp, Homo sapiens
ctttgactcttggggccagggaaccctggtcaccgtctcctcag

SEQ ID NO: 7861 - DNA, 40 bp, Homo sapiens
actttgcctcctggggccacggaaccctggtcaccgtctc

SEQ ID NO: 7862 - DNA, 41 bp, Homo sapiens; identical to SEQ ID NO: 2251

SEQ ID NO: 7863 - DNA, 41 bp, Homo sapiens
ttgcctactggggccagggagccctggtcaccgtctcctca

SEQ ID NO: 7864 - DNA, 43 bp, Homo sapiens
tttgaattctggggccagggaaccctggtcaccgtttcctcag

SEQ ID NO: 7865 - DNA, 37 bp, Homo sapiens
cactggggccagggaaccctggtcaccgtctcctcag

SEQ ID NO: 7866 - DNA, 38 bp, Homo sapiens
ctactggggccggggaaccctggtcaccgtctcctcag

SEQ ID NO: 7867 - DNA, 45 bp, Homo sapiens
cttttgatatctggggccaagggacaatggtcaccgtctcttcag

SEQ ID NO: 7868 - DNA, 54 bp, Homo sapiens
tactactacggtctggacgtctggggcatagggaccacggtcaccgtctcctca

SEQ ID NO: 7869 - DNA, 48 bp, Homo sapiens
actgtttcgacccctggggccagggaacccaggtcatcgtctcctcag

SEQ ID NO: 7870 - DNA, 47 bp, Homo sapiens
caactggttcgacccctggggccagggaaccctggtcatcgtctcct

SEQ ID NO: 7871 - DNA, 46 bp, Homo sapiens
tattttgactactgggtccagggaactctggtcaccgtctcctcag

SEQ ID NO: 7872 - DNA, 47 bp, Homo sapiens; identical to SEQ ID NO: 7870

SEQ ID NO: 7873 - DNA, 45 bp, Homo sapiens
actttgactactggggccagggaaccctggtcagcgtctcatcag

SEQ ID NO: 7874 - DNA, 34 bp, Homo sapiens
tggggccggggcaccctggtcaccgtctcctcag

SEQ ID NO: 7875 - DNA, 52 bp, Homo sapiens
ctactactacatggacgtctggggcaaagggaccacggtcaccgtctcctca

SEQ ID NO: 7876 - DNA, 41 bp, Homo sapiens
tgactattggggccagggaacctgggtcaccgtctcctcag

SEQ ID NO: 7877 - DNA, 46 bp, Homo sapiens
taccttgactcctggggccagggaacccaggtcaccgtctcctcag

SEQ ID NO: 7878 - DNA, 48 bp, Homo sapiens
tacggtatggacgtctggggccaagggaccacggtcaccgtctcctca

SEQ ID NO: 7879 - DNA, 46 bp, Homo sapiens
  modified_base (20)..(20): a, c, t, g, unknown or other
  modified_base (40)..(40): a, c, t, g, unknown or other
actactttgaccactggggncagggaaccctgctcaccgnctcctc

SEQ ID NO: 7880 - DNA, 48 bp, Homo sapiens
actactttgacaactggggccagggaaccctggtcaccgtctcctcag

SEQ ID NO: 7881 - DNA, 48 bp, Homo sapiens
tacactatggacgtctggggccaagggaccacggtcaccgtctcctca

SEQ ID NO: 7882 - DNA, 54 bp, Homo sapiens
tattactacggtatggacgtctggggccgagggaccacggtcgccgtctcctca

SEQ ID NO: 7883 - DNA, 45 bp, Homo sapiens
cttttgacacctggggccaagggacagcagtcgtcgtctcttcag

SEQ ID NO: 7884 - DNA, 36 bp, Homo sapiens
gactactggggccagggaaccctggtcaccgtctcc

SEQ ID NO: 7885 - DNA, 44 bp, Homo sapiens
actttgactactggggccagggaaccctggtcaccgtctcctca

SEQ ID NO: 7886 - DNA, 48 bp, Homo sapiens
ggtacttcgatctctggggccgtggcaccctggtcactgtctcctcag

SEQ ID NO: 7887 - DNA, 43 bp, Homo sapiens
tttgactcctggggccagggaaccctggtcaccgtctcctcag

SEQ ID NO: 7888 - DNA, 39 bp, Homo sapiens
acttctggggccagggaaccctggtcaccgtctcctcag

SEQ ID NO: 7889 - DNA, 42 bp, Homo sapiens
ttgactattggggccagggcaccctggtcaccgtctcctcag

SEQ ID NO: 7890 - DNA, 43 bp, Homo sapiens
tttgactactggggccagggaaccctggtcaccgtctcctcag

SEQ ID NO: 7891 - DNA, 40 bp, Homo sapiens
gagtactggggccagggaaccctggtcaccgtctcctcag

SEQ ID NO: 7892 - DNA, 37 bp, Homo sapiens
tactggggccagggaaccctggtcaccgtctcctcag

SEQ ID NO: 7893 - DNA, 49 bp, Homo sapiens
gatccttttgatatctggggccaagggacaatggtcaccgtctcttcag

SEQ ID NO: 7894 - DNA, 42 bp, Homo sapiens
ttgactcctggggcccgggaacccacgtcaccgtctcctcag

SEQ ID NO: 7895 - DNA, 44 bp, Homo sapiens
actactttgactcctggggccagggaaccctggtcaccgtctcc

SEQ ID NO: 7896 - DNA, 46 bp, Homo sapiens
taccttgactcctggggccagggaaccctggtcaccgtctcctcag

SEQ ID NO: 7897 - DNA, 46 bp, Homo sapiens
tggttcgacccctggggccagggcactctggtcaccgtctcctcag

SEQ ID NO: 7898 - DNA, 46 bp, Homo sapiens
ctactttgaatactggggccagggaaccctggtcgccgtctcctca

SEQ ID NO: 7899 - DNA, 37 bp, Homo sapiens
tactggggccagggaaccctgctcaccgtctccttag

SEQ ID NO: 7900 - DNA, 48 bp, Homo sapiens
actatttcgacccctggggccagggaaccctggtcaccgtctcctcag

SEQ ID NO: 7901 - DNA, 46 bp, Homo sapiens
tggttcgacccctggggccagggaaccctggtcaccgtctcctcag

SEQ ID NO: 7902 - DNA, 59 bp, Homo sapiens
actgctactactactacatggatgtctggggcaaagggaccacggtcaccgtctcctca

SEQ ID NO: 7903 - DNA, 45 bp, Homo sapiens
actggctcgacccctggggccagggaacgctggtcaccgtctcct

SEQ ID NO: 7904 - DNA, 50 bp, Homo sapiens
actatggtatggacgtctggggccacgggaccacggtcaccgtctcctca

SEQ ID NO: 7905 - DNA, 34 bp, Homo sapiens
tggggccagggaaccctggtcaccgtctcttcag

SEQ ID NO: 7906 - DNA, 47 bp, Homo sapiens
actactttgactactggggccagggaaccctggtcaccgtctcctca

SEQ ID NO: 7907 - DNA, 38 bp, Homo sapiens
gactactggggccagggatccctggtccccgtctcctc

SEQ ID NO: 7908 - DNA, 42 bp, Homo sapiens
ttgattactggggccagggaaccctggtcaccgtctcctcag

SEQ ID NO: 7909 - DNA, 48 bp, Homo sapiens
atgcttttgatatctggggccaggggacgatggtcatcatctcttcag

SEQ ID NO: 7910 - DNA, 42 bp, Homo sapiens; identical to SEQ ID NO: 2290

SEQ ID NO: 7911 - DNA, 43 bp, Homo sapiens
tactttgacgtctggggcccggggatcccggtcactgtctcct

SEQ ID NO: 7912 - DNA, 55 bp, Homo sapiens
ctactacttcttcatggacgtctggggcaaagggaccacggtcaccgtcgcctca

SEQ ID NO: 7913 - DNA, 42 bp, Homo sapiens
atggacgtctggggcaaagggaccacggtcaccgtctcctca

SEQ ID NO: 7914 - DNA, 40 bp, Homo sapiens
gactattggggccacggaaccctggtcaccgtctcgtcag

SEQ ID NO: 7915 - DNA, 41 bp, Homo sapiens
tgactactggggccagggaaccctcgtcaccgtctcctcag

SEQ ID NO: 7916 - DNA, 48 bp, Homo sapiens
actactttgactactggggccagggaaccccggtcaccgtctcctcag

SEQ ID NO: 7917 - DNA, 38 bp, Homo sapiens
cccctggggccagggaaccctggtcaccgtctcctcag

SEQ ID NO: 7918 - DNA, 53 bp, Homo sapiens
tactatcacggtatggacgtctggggccaagggaccacggtcatcgtctcctc

SEQ ID NO: 7919 - DNA, 46 bp, Homo sapiens
acggcatggacgtctggggccaagggaccacggtcatcgtctcctc

SEQ ID NO: 7920 - DNA, 48 bp, Homo sapiens
actactttgacttctggggccagggaaccctggtcaccgtctcctcag

SEQ ID NO: 7921 - DNA, 49 bp, Homo sapiens
ctacggtatggacgtctggggccaagggaccacggtcaccgtctcctca

SEQ ID NO: 7922 - DNA, 20 bp, Homo sapiens
ttgcctactggggccaggga

SEQ ID NO: 7923 - DNA, 37 bp, Homo sapiens; identical to SEQ ID NO: 7892

SEQ ID NO: 7924 - DNA, 45 bp, Homo sapiens
tactttgattactggggccagggaaccctggtcaccgtctcgtca

SEQ ID NO: 7925 - DNA, 43 bp, Homo sapiens; identical to SEQ ID NO: 7887

SEQ ID NO: 7926 - DNA, 41 bp, Homo sapiens; identical to SEQ ID NO: 2251

SEQ ID NO: 7927 - DNA, 49 bp, Homo sapiens
cttcgttatggacgtctggggccacgggaccacggtcaccgtctcctca

SEQ ID NO: 7928 - DNA, 40 bp, Homo sapiens
ttgactcctggggccagggaaccctggtcaccgtctcctc

SEQ ID NO: 7929 - DNA, 48 bp, Homo sapiens
atgcttttgatatttggggccaagggacactggtcaccgtctcttcag

SEQ ID NO: 7930 - DNA, 48 bp, Homo sapiens
atgcttttgacatctggggccaagggacaatggtcaccgtctcttcag

SEQ ID NO: 7931 - DNA, 47 bp, Homo sapiens
actactttgactactggggccagggaagcctggtcaccgtctcctca

SEQ ID NO: 7932 - DNA, 45 bp, Homo sapiens
ggaatggacgtctggggccaagggaccacggtcatcgtctcctca

SEQ ID NO: 7933 - DNA, 41 bp, Homo sapiens
tgacttctggggccagggaacccaggttaacgtctcttcag

SEQ ID NO: 7934 - DNA, 44 bp, Homo sapiens; identical to SEQ ID NO: 7844

SEQ ID NO: 7935 - DNA, 51 bp, Homo sapiens
actggtacttcgatgtctggggccgtggcaccctggtcactgtgtcctcag

SEQ ID NO: 7936 - DNA, 35 bp, Homo sapiens
acggtatggacctctggggccaagggaccacggtc

SEQ ID NO: 7937 - DNA, 35 bp, Homo sapiens
acggaatggacgtttggggcctagggaccacggtc

SEQ ID NO: 7938 - DNA, 51 bp, Homo sapiens
taccacggaatggacgtctggggccaagggaccacggtcaccgtctcctca

SEQ ID NO: 7939 - DNA, 47 bp, Homo sapiens
ctactttgagtcctggggccagggagccccggtcaccgtctcttcag

SEQ ID NO: 7940 - DNA, 56 bp, Homo sapiens
actcctattacggtatggacgtctggggccaagggaccacggtcaccgtctcctca

SEQ ID NO: 7941 - DNA, 48 bp, Homo sapiens; identical to SEQ ID NO: 2310

SEQ ID NO: 7942 - DNA, 41 bp, Homo sapiens; identical to SEQ ID NO: 2251

SEQ ID NO: 7943 - DNA, 45 bp, Homo sapiens
actttgacatctggggccagggagccctggtcaccgtgtcctcag

SEQ ID NO: 7944 - DNA, 46 bp, Homo sapiens
cgggttggacgtctggggccaagggaccacggtcaccgtctccgca

SEQ ID NO: 7945 - DNA, 39 bp, Homo sapiens
acttttggggccggggaaccctggtcaccgtctcctcgg

SEQ ID NO: 7946 - DNA, 38 bp, Homo sapiens
ccactggggccagggaaccctggtcaccgtctcctcag

SEQ ID NO: 7947 - DNA, 49 bp, Homo sapiens
actggtatttcgatctctggggccgtggcacccaggtcactgtctcctc

SEQ ID NO: 7948 - DNA, 47 bp, Homo sapiens
gatgcttttgatatctggggccaggggactatggtcatcgtctcttc

SEQ ID NO: 7949 - DNA, 46 bp, Homo sapiens
tggttcggctcctggggccagggaaccctggtcaccgtctcctcag

SEQ ID NO: 7950 - DNA, 56 bp, Homo sapiens
actcctactacgctatggacgtctggggccaagggaccacggtcaccgtctcctca

SEQ ID NO: 7951 - DNA, 53 bp, Homo sapiens
  modified_base (19)..(19): a, c, t, g, unknown or other
  modified_base (28)..(28): a, c, t, g, unknown or other
ctactggtacttcgatctntggggccgnggcaccctggtcactgtctcctcag

SEQ ID NO: 7952 - DNA, 46 bp, Homo sapiens
tattttgagtactggggccagggaaccctggtcaccgtctcctcag

SEQ ID NO: 7953 - DNA, 49 bp, Homo sapiens
tggtacttcgatctctggggccgtggaaccctggtcaccgtctcctcag

SEQ ID NO: 7954 - DNA, 35 bp, Homo sapiens
ctggggccacggaaccctggtcaccgtctcctcag

SEQ ID NO: 7955 - DNA, 46 bp, Homo sapiens
tacggtgtggacatctggggccaagggaccacggtcaccgtctcct

SEQ ID NO: 7956 - DNA, 56 bp, Homo sapiens
actactactatggtatggacgtctggggccaagggaccacggtcaccgtctcctca

SEQ ID NO: 7957 - DNA, 30 bp, Homo sapiens
ctcctggggccagggaaccctggtcaccgt

SEQ ID NO: 7958 - DNA, 47 bp, Homo sapiens
tacggtatggacgtctggggccaagggaccacggtcaccgtctcctc

SEQ ID NO: 7959 - DNA, 45 bp, Homo sapiens; identical to SEQ ID NO: 2288

SEQ ID NO: 7960 - DNA, 42 bp, Homo sapiens
tttgactcctggggccagggaaccctggtctccgtctcctca

SEQ ID NO: 7961 - DNA, 39 bp, Homo sapiens
actactggggccaaggaacccaggtcaccgtctcctcag

SEQ ID NO: 7962 - DNA, 55 bp, Homo sapiens
acttctactacgctatggacgtctggggccaagggaccacggtcaccgtctcctc

SEQ ID NO: 7963 - DNA, 43 bp, Homo sapiens
ttcgatctctggggccgtggcaccctggtcaccgtctcctcag

SEQ ID NO: 7964 - DNA, 43 bp, Homo sapiens
tttgatctttggggccaagggacaatggtcaccgtctcttcag

SEQ ID NO: 7965 - DNA, 48 bp, Homo sapiens; identical to SEQ ID NO: 7920

SEQ ID NO: 7966 - DNA, 57 bp, Homo sapiens
tactactactactactcggacgtctggggcaaagggaccacggtcaccgtctcctca

SEQ ID NO: 7967 - DNA, 43 bp, Homo sapiens
tttgacacctggggccagggagccctggtcaccgtctcctcag

SEQ ID NO: 7968 - DNA, 48 bp, Homo sapiens
ggtacttcgatctctggggccgtggcaccctggtcaccgtctcctcag

SEQ ID NO: 7969 - DNA, 48 bp, Homo sapiens; identical to SEQ ID NO: 2310

SEQ ID NO: 7970 - DNA, 48 bp, Homo sapiens; identical to SEQ ID NO: 2310

SEQ ID NO: 7971 - DNA, 42 bp, Homo sapiens; identical to SEQ ID NO: 2269

SEQ ID NO: 7972 - DNA, 56 bp, Homo sapiens
actactactacggtatggacgtctggggccaagggaccacggtcaccgtctcctca

SEQ ID NO: 7973 - DNA, 46 bp, Homo sapiens; identical to SEQ ID NO: 2326

SEQ ID NO: 7974 - DNA, 43 bp, Homo sapiens
ggttcgacccctggggccagggagccctggtcaccgtctcctc

SEQ ID NO: 7975 - DNA, 62 bp, Homo sapiens
atttctactactactacggtatggacgtctggggccaagggaccacggtcaccgtctcctca

SEQ ID NO: 7976 - DNA, 48 bp, Homo sapiens; identical to SEQ ID NO: 2310

SEQ ID NO: 7977 - DNA, 49 bp, Homo sapiens
tggtacttcgatctctggggccgtggcaccctggtcactgtctcctcag

SEQ ID NO: 7978 - DNA, 34 bp, Homo sapiens
actggggccagggaaccctggtcaccgtctcctc

SEQ ID NO: 7979 - DNA, 43 bp, Homo sapiens; identical to SEQ ID NO: 7890

SEQ ID NO: 7980 - DNA, 46 bp, Homo sapiens; identical to SEQ ID NO: 7901

SEQ ID NO: 7981 - DNA, 46 bp, Homo sapiens; identical to SEQ ID NO: 2326

SEQ ID NO: 7982 - DNA, 47 bp, Homo sapiens
acgacatggacgtctggggccaagggaccacggtcatcgtctcctca

SEQ ID NO: 7983 - DNA, 47 bp, Homo sapiens
actggttcgacccctggggccagggaaccctggtcaccgtctcctca

SEQ ID NO: 7984 - DNA, 62 bp, Homo sapiens
attactactactactactacatggacgtctggggcaaagggaccacggtcaccgtctcctca

SEQ ID NO: 7985 - DNA, 52 bp, Homo sapiens
tactggtacttcgatctctggggccgtggcaccctggtcactgtctcctcag

SEQ ID NO: 7986 - DNA, 51 bp, Homo sapiens
  modified_base (17)..(17): a, c, t, g, unknown or other
tattacggtatggacgnctggggccaagggaccacggtcaccgtctcctca

SEQ ID NO: 7987 - DNA, 37 bp, Homo sapiens; identical to SEQ ID NO: 7892

SEQ ID NO: 7988 - DNA, 51 bp, Homo sapiens
acaactggttcgacccctggggccagggaaccctggtcaccgtctcctcag

SEQ ID NO: 7989 - DNA, 50 bp, Homo sapiens
actattatatggacgtctggggcaaagggaccacggtcaccgtctcctca

SEQ ID NO: 7990 - DNA, 46 bp, Homo sapiens; identical to SEQ ID NO: 7901

SEQ ID NO: 7991 - DNA, 48 bp, Homo sapiens; identical to SEQ ID NO: 7878

SEQ ID NO: 7992 - DNA, 48 bp, Homo sapiens
tactacatggacgtctggggcaaagggaccacggtcaccgtctcctca

SEQ ID NO: 7993 - DNA, 42 bp, Homo sapiens
ctttgactcctggggccgggggaccctggtcaccgtctcctc

SEQ ID NO: 7994 - DNA, 61 bp, Homo sapiens
ttactactactactacggtatggacgtctggggccaagggaccacggtcaccgtctcctca

SEQ ID NO: 7995 - DNA, 45 bp, Homo sapiens
ggttcgacccctggggccagggaaccctggtcaccgtctcctcag

SEQ ID NO: 7996 - DNA, 43 bp, Homo sapiens
catggacgtctggggcaaagggaccacggtcaccgtctcctca

SEQ ID NO: 7997 - DNA, 43 bp, Homo sapiens
tttcactactggggccagggaaccctggtcaccgtctcctcag

SEQ ID NO: 7998 - DNA, 42 bp, Homo sapiens; identical to SEQ ID NO: 2269

SEQ ID NO: 7999 - DNA, 46 bp, Homo sapiens; identical to SEQ ID NO: 2326

SEQ ID NO: 8000 - DNA, 43 bp, Homo sapiens; identical to SEQ ID NO: 7890

SEQ ID NO: 8001 - DNA, 52 bp, Homo sapiens
gctgaatacttccagcactggggccagggcaccctggtcaccgtctcctcag

SEQ ID NO: 8002 - DNA, 57 bp, Homo sapiens; identical to SEQ ID NO: 2327

SEQ ID NO: 8003 - DNA, 46 bp, Homo sapiens
gcttttgatatctggggccaagggacaatggtcaccgtctcttcag

SEQ ID NO: 8004 - DNA, 51 bp, Homo sapiens
tactacttcatggacgtctggggcagagggaccacggtcaccgtctcctca

SEQ ID NO: 8005 - DNA, 44 bp, Homo sapiens; identical to SEQ ID NO: 7844

SEQ ID NO: 8006 - DNA, 40 bp, Homo sapiens
gactactggggccagggaaccctggtcaccgtctcctcag

SEQ ID NO: 8007 - DNA, 44 bp, Homo sapiens; identical to SEQ ID NO: 7844

SEQ ID NO: 8008 - DNA, 50 bp, Homo sapiens
actggtacttcgatctctggggccgtggcaccctggtcactgtctcctca

SEQ ID NO: 8009 - DNA, 43 bp, Homo sapiens; identical to SEQ ID NO: 7890

SEQ ID NO: 8010 - DNA, 45 bp, Homo sapiens
tacttggacgtctggggcaaagggaccacggtcaccgtctcttcc

SEQ ID NO: 8011 - DNA, 48 bp, Homo sapiens; identical to SEQ ID NO: 2310

SEQ ID NO: 8012 - DNA, 51 bp, Homo sapiens
tactactacatggacgtctggggcaaagggaccacggtcaccgtctcctca

SEQ ID NO: 8013 - DNA, 51 bp, Homo sapiens; identical to SEQ ID NO: 8012

SEQ ID NO: 8014 - DNA, 48 bp, Homo sapiens; identical to SEQ ID NO: 2310

SEQ ID NO: 8015 - DNA, 47 bp, Homo sapiens
ctggttcgacccctggggccagggaaccctggtcaccgtctcctcag

SEQ ID NO: 8016 - DNA, 48 bp, Homo sapiens; identical to SEQ ID NO: 2310

SEQ ID NO: 8017 - DNA, 46 bp, Homo sapiens; identical to SEQ ID NO: 7901

SEQ ID NO: 8018 - DNA, 46 bp, Homo sapiens; identical to SEQ ID NO: 2326

SEQ ID NO: 8019 - DNA, 39 bp, Homo sapiens
gacgtctggggccaagggaccacggtcaccgtctcctca

SEQ ID NO: 8020 - DNA, 57 bp, Homo sapiens; identical to SEQ ID NO: 2327

SEQ ID NO: 8021 - DNA, 41 bp, Homo sapiens; identical to SEQ ID NO: 2251

SEQ ID NO: 8022 - DNA, 43 bp, Homo sapiens; identical to SEQ ID NO: 7890

SEQ ID NO: 8023 - DNA, 44 bp, Homo sapiens; identical to SEQ ID NO: 7844

SEQ ID NO: 8024 - DNA, 45 bp, Homo sapiens
actttggctactggggccagggaaccctggtcaccgtctcctcag

SEQ ID NO: 8025 - DNA, 45 bp, Homo sapiens
ggttcgacccgtggggccagggaaccctggtcaccgtctcctcag

SEQ ID NO: 8026 - DNA, 48 bp, Homo sapiens; identical to SEQ ID NO: 2310

SEQ ID NO: 8027 - DNA, 41 bp, Homo sapiens
  modified_base (37)..(37): a, c, t, g, unknown or other
tgactactggggccagggaaccctggtcaccgtctcntcag

SEQ ID NO: 8028 - DNA, 49 bp, Homo sapiens
gattattttgatgtctggggccaagggacaatggtcaccgtctcttcag

SEQ ID NO: 8029 - DNA, 56 bp, Homo sapiens
tactactactacggtatggacgtctggggccaagggaccacggtcaccgtctcctc

SEQ ID NO: 8030 - DNA, 48 bp, Homo sapiens; identical to SEQ ID NO: 2310

SEQ ID NO: 8031 - DNA, 41 bp, Homo sapiens
tttgactactggggccagggaaccctggtcaccgtctcctc

SEQ ID NO: 8032 - DNA, 51 bp, Homo sapiens; identical to SEQ ID NO: 8012

SEQ ID NO: 8033 - DNA, 42 bp, Homo sapiens; identical to SEQ ID NO: 2290

SEQ ID NO: 8034 - DNA, 48 bp, Homo sapiens; identical to SEQ ID NO: 2310

SEQ ID NO: 8035 - DNA, 58 bp, Homo sapiens; identical to SEQ ID NO: 7855

SEQ ID NO: 8036 - DNA, 44 bp, Homo sapiens; identical to SEQ ID NO: 7844

SEQ ID NO: 8037 - DNA, 48 bp, Homo sapiens; identical to SEQ ID NO: 2310

SEQ ID NO: 8038 - DNA, 46 bp, Homo sapiens
tggtttgacttctggggccagggaaccctggtcaccgtctcctcag

SEQ ID NO: 8039 - DNA, 40 bp, Homo sapiens; identical to SEQ ID NO: 8006

SEQ ID NO: 8040 - DNA, 48 bp, Homo sapiens; identical to SEQ ID NO: 2310

SEQ ID NO: 8041 - DNA, 44 bp, Homo sapiens
tactttgactactggggccagggaaccctggtcaccgtctcctc

SEQ ID NO: 8042 - DNA, 34 bp, Homo sapiens
tggggccagggcaccctggtcaccgtctcctcag

SEQ ID NO: 8043 - DNA, 33 bp, Homo sapiens
tggggcaaagggaccccggtcatcgtctcctca

SEQ ID NO: 8044 - DNA, 33 bp, Homo sapiens
tggggcaaggggaccacggtcaccgtctcctca

SEQ ID NO: 8045 - DNA, 34 bp, Homo sapiens
tggggccagggaaccctggtcgccgtcacctcag

SEQ ID NO: 8046 - DNA, 34 bp, Homo sapiens
tggggccagggaatccgggtcaccgtctcctcag

SEQ ID NO: 8047 - DNA, 34 bp, Homo sapiens
tggggccagggaaccttggtcaccgtctcctcag

SEQ ID NO: 8048 - DNA, 34 bp, Homo sapiens; identical to SEQ ID NO: 2352

SEQ ID NO: 8049 - DNA, 34 bp, Homo sapiens; identical to SEQ ID NO: 2342

SEQ ID NO: 8050 - DNA, 34 bp, Homo sapiens; identical to SEQ ID NO: 2342

SEQ ID NO: 8051 - DNA, 29 bp, Homo sapiens
tggggacaagggacaatggtcaccgtctc

SEQ ID NO: 8052 - DNA, 33 bp, Homo sapiens; identical to SEQ ID NO: 49

SEQ ID NO: 8053 - DNA, 34 bp, Homo sapiens
tggggccaagggacactggtcaccgtctcctcag

SEQ ID NO: 8054 - DNA, 34 bp, Homo sapiens
tggggccacggaaccctggtcaccgtctcctcag

SEQ ID NO: 8055 - DNA, 34 bp, Homo sapiens
tggggccgtggcaccctggtcaccgtctcctcag

SEQ ID NO: 8056 - DNA, 34 bp, Homo sapiens; identical to SEQ ID NO: 2405

SEQ ID NO: 8057 - DNA, 34 bp, Homo sapiens; identical to SEQ ID NO: 2342

SEQ ID NO: 8058 - DNA, 34 bp, Homo sapiens; identical to SEQ ID NO: 2413

SEQ ID NO: 8059 - DNA, 34 bp, Homo sapiens
tggggccgtggcgtcctggtcaccgtctcctcag

SEQ ID NO: 8060 - DNA, 33 bp, Homo sapiens; identical to SEQ ID NO: 49

SEQ ID NO: 8061 - DNA, 34 bp, Homo sapiens; identical to SEQ ID NO: 2367

SEQ ID NO: 8062 - DNA, 34 bp, Homo sapiens
tggggccgtggcgccctggtcaccgtctcctcag

SEQ ID NO: 8063 - DNA, 33 bp, Homo sapiens
tggggcagagggactacggtcaccgtctcctca

SEQ ID NO: 8064 - DNA, 34 bp, Homo sapiens; identical to SEQ ID NO: 2342

SEQ ID NO: 8065 - DNA, 34 bp, Homo sapiens; identical to SEQ ID NO: 2342

SEQ ID NO: 8066 - DNA, 29 bp, Homo sapiens
tggggccacggaaccctggtcaccgtctc

SEQ ID NO: 8067 - DNA, 34 bp, Homo sapiens; identical to SEQ ID NO: 2342

SEQ ID NO: 8068 - DNA, 33 bp, Homo sapiens
tggggccagggagccctggtcaccgtctcctca

SEQ ID NO: 8069 - DNA, 34 bp, Homo sapiens
tggggccagggaaccctggtcaccgtttcctcag

SEQ ID NO: 8070 - DNA, 34 bp, Homo sapiens; identical to SEQ ID NO: 2342

SEQ ID NO: 8071 - DNA, 34 bp, Homo sapiens; identical to SEQ ID NO: 2346

SEQ ID NO: 8072 - DNA, 34 bp, Homo sapiens; identical to SEQ ID NO: 2367

SEQ ID NO: 8073 - DNA, 33 bp, Homo sapiens
tggggcatagggaccacggtcaccgtctcctca

SEQ ID NO: 8074 - DNA, 34 bp, Homo sapiens
tggggccagggaacccaggtcatcgtctcctcag

SEQ ID NO: 8075 - DNA, 31 bp, Homo sapiens
tggggccagggaaccctggtcatcgtctcct

SEQ ID NO: 8076 - DNA, 34 bp, Homo sapiens
tgggtccagggaactctggtcaccgtctcctcag

SEQ ID NO: 8077 - DNA, 31 bp, Homo sapiens; identical to SEQ ID NO: 8075

SEQ ID NO: 8078 - DNA, 34 bp, Homo sapiens
tggggccagggaaccctggtcagcgtctcatcag

SEQ ID NO: 8079 - DNA, 34 bp, Homo sapiens; identical to SEQ ID NO: 7874

SEQ ID NO: 8080 - DNA, 33 bp, Homo sapiens; identical to SEQ ID NO: 49

SEQ ID NO: 8081 - DNA, 34 bp, Homo sapiens
tggggccagggaacctgggtcaccgtctcctcag

SEQ ID NO: 8082 - DNA, 34 bp, Homo sapiens
tggggccagggaacccaggtcaccgtctcctcag

SEQ ID NO: 8083 - DNA, 33 bp, Homo sapiens; identical to SEQ ID NO: 2371

SEQ ID NO: 8084 - DNA, 32 bp, Homo sapiens
  modified_base (6)..(6): a, c, t, g, unknown or other
  modified_base (26)..(26): a, c, t, g, unknown or other
tggggncagggaaccctgctcaccgnctcctc

SEQ ID NO: 8085 - DNA, 34 bp, Homo sapiens; identical to SEQ ID NO: 2342

SEQ ID NO: 8086 - DNA, 33 bp, Homo sapiens; identical to SEQ ID NO: 2371

SEQ ID NO: 8087 - DNA, 33 bp, Homo sapiens
tggggccgagggaccacggtcgccgtctcctca

SEQ ID NO: 8088 - DNA, 34 bp, Homo sapiens
tggggccaagggacagcagtcgtcgtctcttcag

SEQ ID NO: 8089 - DNA, 30 bp, Homo sapiens
tggggccagggaaccctggtcaccgtctcc

SEQ ID NO: 8090 - DNA, 33 bp, Homo sapiens
tggggccagggaaccctggtcaccgtctcctca

SEQ ID NO: 8091 - DNA, 34 bp, Homo sapiens
tggggccgtggcaccctggtcactgtctcctcag

SEQ ID NO: 8092 - DNA, 34 bp, Homo sapiens; identical to SEQ ID NO: 2342

SEQ ID NO: 8093 - DNA, 34 bp, Homo sapiens; identical to SEQ ID NO: 2342

SEQ ID NO: 8094 - DNA, 34 bp, Homo sapiens; identical to SEQ ID NO: 8042

SEQ ID NO: 8095 - DNA, 34 bp, Homo sapiens; identical to SEQ ID NO: 2342

SEQ ID NO: 8096 - DNA, 34 bp, Homo sapiens; identical to SEQ ID NO: 2342

SEQ ID NO: 8097 - DNA, 34 bp, Homo sapiens; identical to SEQ ID NO: 2342

SEQ ID NO: 8098 - DNA, 34 bp, Homo sapiens; identical to SEQ ID NO: 2367

SEQ ID NO: 8099 - DNA, 34 bp, Homo sapiens
tggggcccgggaacccacgtcaccgtctcctcag

SEQ ID NO: 8100 - DNA, 30 bp, Homo sapiens; identical to SEQ ID NO: 8089

SEQ ID NO: 8101 - DNA, 34 bp, Homo sapiens; identical to SEQ ID NO: 2342

SEQ ID NO: 8102 - DNA, 34 bp, Homo sapiens
tggggccagggcactctggtcaccgtctcctcag

SEQ ID NO: 8103 - DNA, 33 bp, Homo sapiens
tggggccagggaaccctggtcgccgtctcctca

SEQ ID NO: 8104 - DNA, 34 bp, Homo sapiens
tggggccagggaaccctgctcaccgtctccttag

SEQ ID NO: 8105 - DNA, 34 bp, Homo sapiens; identical to SEQ ID NO: 2342

SEQ ID NO: 8106 - DNA, 34 bp, Homo sapiens; identical to SEQ ID NO: 2342

SEQ ID NO: 8107 - DNA, 33 bp, Homo sapiens; identical to SEQ ID NO: 49

SEQ ID NO: 8108 - DNA, 31 bp, Homo sapiens
tggggccagggaacgctggtcaccgtctcct

SEQ ID NO: 8109 - DNA, 33 bp, Homo sapiens
tggggccacgggaccacggtcaccgtctcctca

SEQ ID NO: 8110 - DNA, 34 bp, Homo sapiens; identical to SEQ ID NO: 7905

SEQ ID NO: 8111 - DNA, 33 bp, Homo sapiens; identical to SEQ ID NO: 8090

SEQ ID NO: 8112 - DNA, 32 bp, Homo sapiens
tggggccagggatccctggtccccgtctcctc

SEQ ID NO: 8113 - DNA, 34 bp, Homo sapiens; identical to SEQ ID NO: 2342

SEQ ID NO: 8114 - DNA, 34 bp, Homo sapiens
tggggccaggggacgatggtcatcatctcttcag

SEQ ID NO: 8115 - DNA, 34 bp, Homo sapiens; identical to SEQ ID NO: 2342

SEQ ID NO: 8116 - DNA, 31 bp, Homo sapiens
tggggcccggggatcccggtcactgtctcct

SEQ ID NO: 8117 - DNA, 33 bp, Homo sapiens
tggggcaaagggaccacggtcaccgtcgcctca

SEQ ID NO: 8118 - DNA, 33 bp, Homo sapiens; identical to SEQ ID NO: 49

SEQ ID NO: 8119 - DNA, 34 bp, Homo sapiens
tggggccacggaaccctggtcaccgtctcgtcag

SEQ ID NO: 8120 - DNA, 34 bp, Homo sapiens
tggggccagggaaccctcgtcaccgtctcctcag

SEQ ID NO: 8121 - DNA, 34 bp, Homo sapiens
tggggccagggaaccccggtcaccgtctcctcag

SEQ ID NO: 8122 - DNA, 34 bp, Homo sapiens; identical to SEQ ID NO: 2342

SEQ ID NO: 8123 - DNA, 32 bp, Homo sapiens
tggggccaagggaccacggtcatcgtctcctc

SEQ ID NO: 8124 - DNA, 32 bp, Homo sapiens; identical to SEQ ID NO: 8123

SEQ ID NO: 8125 - DNA, 34 bp, Homo sapiens; identical to SEQ ID NO: 2342

SEQ ID NO: 8126 - DNA, 33 bp, Homo sapiens; identical to SEQ ID NO: 2371

SEQ ID NO: 8127 - DNA, 12 bp, Homo sapiens
tggggccaggga

SEQ ID NO: 8128 - DNA, 34 bp, Homo sapiens; identical to SEQ ID NO: 2342

SEQ ID NO: 8129 - DNA, 33 bp, Homo sapiens
tggggccagggaaccctggtcaccgtctcgtca

SEQ ID NO: 8130 - DNA, 34 bp, Homo sapiens; identical to SEQ ID NO: 2342

SEQ ID NO: 8131 - DNA, 34 bp, Homo sapiens; identical to SEQ ID NO: 2342

SEQ ID NO: 8132 - DNA, 33 bp, Homo sapiens; identical to SEQ ID NO: 8109

SEQ ID NO: 8133 - DNA, 32 bp, Homo sapiens
tggggccagggaaccctggtcaccgtctcctc

SEQ ID NO: 8134 - DNA, 34 bp, Homo sapiens
tggggccaagggacactggtcaccgtctcttcag

SEQ ID NO: 8135 - DNA, 34 bp, Homo sapiens; identical to SEQ ID NO: 2367

SEQ ID NO: 8136 - DNA, 33 bp, Homo sapiens
tggggccagggaagcctggtcaccgtctcctca

SEQ ID NO: 8137 - DNA, 33 bp, Homo sapiens
tggggccaagggaccacggtcatcgtctcctca

SEQ ID NO: 8138 - DNA, 34 bp, Homo sapiens
tggggccagggaacccaggttaacgtctcttcag

SEQ ID NO: 8139 - DNA, 34 bp, Homo sapiens; identical to SEQ ID NO: 2342

SEQ ID NO: 8140 - DNA, 34 bp, Homo sapiens
tggggccgtggcaccctggtcactgtgtcctcag

SEQ ID NO: 8141 - DNA, 21 bp, Homo sapiens
tggggccaagggaccacggtc

SEQ ID NO: 8142 - DNA, 21 bp, Homo sapiens
tggggcctagggaccacggtc

SEQ ID NO: 8143 - DNA, 33 bp, Homo sapiens; identical to SEQ ID NO: 2371

SEQ ID NO: 8144 - DNA, 34 bp, Homo sapiens
tggggccagggagccccggtcaccgtctcttcag

SEQ ID NO: 8145 - DNA, 33 bp, Homo sapiens; identical to SEQ ID NO: 2371

SEQ ID NO: 8146 - DNA, 34 bp, Homo sapiens; identical to SEQ ID NO: 2342

SEQ ID NO: 8147 - DNA, 34 bp, Homo sapiens; identical to SEQ ID NO: 2342

SEQ ID NO: 8148 - DNA, 34 bp, Homo sapiens
tggggccagggagccctggtcaccgtgtcctcag

SEQ ID NO: 8149 - DNA, 33 bp, Homo sapiens
tggggccaagggaccacggtcaccgtctccgca

SEQ ID NO: 8150 - DNA, 34 bp, Homo sapiens
tggggccggggaaccctggtcaccgtctcctcgg

SEQ ID NO: 8151 - DNA, 34 bp, Homo sapiens; identical to SEQ ID NO: 2342

SEQ ID NO: 8152 - DNA, 32 bp, Homo sapiens
tggggccgtggcacccaggtcactgtctcctc

SEQ ID NO: 8153 - DNA, 32 bp, Homo sapiens
tggggccaggggactatggtcatcgtctcttc

SEQ ID NO: 8154 - DNA, 34 bp, Homo sapiens; identical to SEQ ID NO: 2342

SEQ ID NO: 8155 - DNA, 33 bp, Homo sapiens; identical to SEQ ID NO: 2371

SEQ ID NO: 8156 - DNA, 34 bp, Homo sapiens
  modified_base (9)..(9): a, c, t, g, unknown or other
tggggccgnggcaccctggtcactgtctcctcag

SEQ ID NO: 8157 - DNA, 34 bp, Homo sapiens; identical to SEQ ID NO: 2342

SEQ ID NO: 8158 - DNA, 34 bp, Homo sapiens
tggggccgtggaaccctggtcaccgtctcctcag

SEQ ID NO: 8159 - DNA, 34 bp, Homo sapiens; identical to SEQ ID NO: 8054

SEQ ID NO: 8160 - DNA, 31 bp, Homo sapiens
tggggccaagggaccacggtcaccgtctcct

SEQ ID NO: 8161 - DNA, 33 bp, Homo sapiens; identical to SEQ ID NO: 2371

SEQ ID NO: 8162 - DNA, 26 bp, Homo sapiens
tggggccagggaaccctggtcaccgt

SEQ ID NO: 8163 - DNA, 32 bp, Homo sapiens
tggggccaagggaccacggtcaccgtctcctc

SEQ ID NO: 8164 - DNA, 34 bp, Homo sapiens; identical to SEQ ID NO: 2342

SEQ ID NO: 8165 - DNA, 33 bp, Homo sapiens
tggggccagggaaccctggtctccgtctcctca

SEQ ID NO: 8166 - DNA, 34 bp, Homo sapiens
tggggccaaggaacccaggtcaccgtctcctcag

SEQ ID NO: 8167 - DNA, 32 bp, Homo sapiens; identical to SEQ ID NO: 8163

SEQ ID NO: 8168 - DNA, 34 bp, Homo sapiens; identical to SEQ ID NO: 8055

SEQ ID NO: 8169 - DNA, 34 bp, Homo sapiens; identical to SEQ ID NO: 2367

SEQ ID NO: 8170 - DNA, 34 bp, Homo sapiens; identical to SEQ ID NO: 2342

SEQ ID NO: 8171 - DNA, 33 bp, Homo sapiens; identical to SEQ ID NO: 49

SEQ ID NO: 8172 - DNA, 34 bp, Homo sapiens; identical to SEQ ID NO: 2352

SEQ ID NO: 8173 - DNA, 34 bp, Homo sapiens; identical to SEQ ID NO: 8055

SEQ ID NO: 8174 - DNA, 34 bp, Homo sapiens; identical to SEQ ID NO: 2342

SEQ ID NO: 8175 - DNA, 34 bp, Homo sapiens; identical to SEQ ID NO: 2342

SEQ ID NO: 8176 - DNA, 34 bp, Homo sapiens; identical to SEQ ID NO: 2342

SEQ ID NO: 8177 - DNA, 33 bp, Homo sapiens; identical to SEQ ID NO: 2371

SEQ ID NO: 8178 - DNA, 34 bp, Homo sapiens; identical to SEQ ID NO: 2342

SEQ ID NO: 8179 - DNA, 32 bp, Homo sapiens
tggggccagggagccctggtcaccgtctcctc

SEQ ID NO: 8180 - DNA, 33 bp, Homo sapiens; identical to SEQ ID NO: 2371

SEQ ID NO: 8181 - DNA, 34 bp, Homo sapiens; identical to SEQ ID NO: 2342

SEQ ID NO: 8182 - DNA, 34 bp, Homo sapiens; identical to SEQ ID NO: 8091

SEQ ID NO: 8183 - DNA, 32 bp, Homo sapiens; identical to SEQ ID NO: 8133

SEQ ID NO: 8184 - DNA, 34 bp, Homo sapiens; identical to SEQ ID NO: 2342

SEQ ID NO: 8185 - DNA, 34 bp, Homo sapiens; identical to SEQ ID NO: 2342

SEQ ID NO: 8186 - DNA, 34 bp, Homo sapiens; identical to SEQ ID NO: 2342

SEQ ID NO: 8187 - DNA, 33 bp, Homo sapiens; identical to SEQ ID NO: 8137

SEQ ID NO: 8188 - DNA, 33 bp, Homo sapiens; identical to SEQ ID NO: 8090

SEQ ID NO: 8189 - DNA, 33 bp, Homo sapiens; identical to SEQ ID NO: 49

SEQ ID NO: 8190 - DNA, 34 bp, Homo sapiens; identical to SEQ ID NO: 8091

SEQ ID NO: 8191 - DNA, 33 bp, Homo sapiens; identical to SEQ ID NO: 2371

SEQ ID NO: 8192 - DNA, 34 bp, Homo sapiens; identical to SEQ ID NO: 2342

SEQ ID NO: 8193 - DNA, 34 bp, Homo sapiens
ttgagccagggaaccctggtcaccgtctcctcag

SEQ ID NO: 8194 - DNA, 34 bp, Homo sapiens; identical to SEQ ID NO: 2342

SEQ ID NO: 8195 - DNA, 33 bp, Homo sapiens; identical to SEQ ID NO: 49

SEQ ID NO: 8196 - DNA, 34 bp, Homo sapiens; identical to SEQ ID NO: 2342

SEQ ID NO: 8197 - DNA, 33 bp, Homo sapiens; identical to SEQ ID NO: 2371

SEQ ID NO: 8198 - DNA, 33 bp, Homo sapiens; identical to SEQ ID NO: 49

SEQ ID NO: 8199 - DNA, 32 bp, Homo sapiens
tggggccgggggaccctggtcaccgtctcctc

SEQ ID NO: 8200 - DNA, 33 bp, Homo sapiens; identical to SEQ ID NO: 2371

SEQ ID NO: 8201 - DNA, 34 bp, Homo sapiens; identical to SEQ ID NO: 2342

SEQ ID NO: 8202 - DNA, 33 bp, Homo sapiens; identical to SEQ ID NO: 49

SEQ ID NO: 8203 - DNA, 34 bp, Homo sapiens; identical to SEQ ID NO: 2342

SEQ ID NO: 8204 - DNA, 34 bp, Homo sapiens; identical to SEQ ID NO: 2342

SEQ ID NO: 8205 - DNA, 34 bp, Homo sapiens; identical to SEQ ID NO: 2342

SEQ ID NO: 8206 - DNA, 34 bp, Homo sapiens; identical to SEQ ID NO: 2342

SEQ ID NO: 8207 - DNA, 34 bp, Homo sapiens; identical to SEQ ID NO: 8042

SEQ ID NO: 8208 - DNA, 33 bp, Homo sapiens; identical to SEQ ID NO: 49

SEQ ID NO: 8209 - DNA, 34 bp, Homo sapiens; identical to SEQ ID NO: 2367

SEQ ID NO: 8210 - DNA, 33 bp, Homo sapiens
tggggcagagggaccacggtcaccgtctcctca

SEQ ID NO: 8211 - DNA, 34 bp, Homo sapiens; identical to SEQ ID NO: 2342

SEQ ID NO: 8212 - DNA, 34 bp, Homo sapiens; identical to SEQ ID NO: 2342

SEQ ID NO: 8213 - DNA, 34 bp, Homo sapiens; identical to SEQ ID NO: 2342

SEQ ID NO: 8214 - DNA, 33 bp, Homo sapiens
tggggccgtggcaccctggtcactgtctcctca

SEQ ID NO: 8215 - DNA, 34 bp, Homo sapiens; identical to SEQ ID NO: 2342

SEQ ID NO: 8216 - DNA, 33 bp, Homo sapiens
tggggcaaagggaccacggtcaccgtctcttcc

SEQ ID NO: 8217 - DNA, 34 bp, Homo sapiens; identical to SEQ ID NO: 2342

SEQ ID NO: 8218 - DNA, 33 bp, Homo sapiens; identical to SEQ ID NO: 49

SEQ ID NO: 8219 - DNA, 33 bp, Homo sapiens; identical to SEQ ID NO: 49

SEQ ID NO: 8220 - DNA, 34 bp, Homo sapiens; identical to SEQ ID NO: 2342

SEQ ID NO: 8221 - DNA, 34 bp, Homo sapiens; identical to SEQ ID NO: 2342

SEQ ID NO: 8222 - DNA, 34 bp, Homo sapiens; identical to SEQ ID NO: 2342

SEQ ID NO: 8223 - DNA, 34 bp, Homo sapiens; identical to SEQ ID NO: 2342

SEQ ID NO: 8224 - DNA, 34 bp, Homo sapiens; identical to SEQ ID NO: 2342

SEQ ID NO: 8225 - DNA, 33 bp, Homo sapiens; identical to SEQ ID NO: 2371

SEQ ID NO: 8226 - DNA, 33 bp, Homo sapiens; identical to SEQ ID NO: 49

SEQ ID NO: 8227 - DNA, 34 bp, Homo sapiens; identical to SEQ ID NO: 2342

SEQ ID NO: 8228 - DNA, 34 bp, Homo sapiens; identical to SEQ ID NO: 2342

SEQ ID NO: 8229 - DNA, 34 bp, Homo sapiens; identical to SEQ ID NO: 2342

SEQ ID NO: 8230 - DNA, 34 bp, Homo sapiens; identical to SEQ ID NO: 2342

SEQ ID NO: 8231 - DNA, 34 bp, Homo sapiens; identical to SEQ ID NO: 2342

SEQ ID NO: 8232 - DNA, 34 bp, Homo sapiens; identical to SEQ ID NO: 2342

SEQ ID NO: 8233 - DNA, 34 bp, Homo sapiens
  modified_base (30)..(30): a, c, t, g, unknown or other
tggggccagggaaccctggtcaccgtctcntcag

SEQ ID NO: 8234 - DNA, 34 bp, Homo sapiens; identical to SEQ ID NO: 2367

SEQ ID NO: 8235 - DNA, 32 bp, Homo sapiens; identical to SEQ ID NO: 8163

SEQ ID NO: 8236 - DNA, 34 bp, Homo sapiens; identical to SEQ ID NO: 2342

SEQ ID NO: 8237 - DNA, 32 bp, Homo sapiens; identical to SEQ ID NO: 8133

SEQ ID NO: 8238 - DNA, 33 bp, Homo sapiens; identical to SEQ ID NO: 49

SEQ ID NO: 8239 - DNA, 34 bp, Homo sapiens; identical to SEQ ID NO: 2342

SEQ ID NO: 8240 - DNA, 34 bp, Homo sapiens; identical to SEQ ID NO: 2342

SEQ ID NO: 8241 - DNA, 33 bp, Homo sapiens; identical to SEQ ID NO: 49

SEQ ID NO: 8242 - DNA, 34 bp, Homo sapiens; identical to SEQ ID NO: 2342

SEQ ID NO: 8243 - DNA, 34 bp, Homo sapiens; identical to SEQ ID NO: 2342

SEQ ID NO: 8244 - DNA, 34 bp, Homo sapiens; identical to SEQ ID NO: 2342

SEQ ID NO: 8245 - DNA, 34 bp, Homo sapiens; identical to SEQ ID NO: 2342

SEQ ID NO: 8246 - DNA, 34 bp, Homo sapiens; identical to SEQ ID NO: 2342

SEQ ID NO: 8247 - DNA, 32 bp, Homo sapiens; identical to SEQ ID NO: 8133

SEQ ID NO: 8248 - protein, 117 aa, Homo sapiens; identical to SEQ ID NO: 2439

SEQ ID NO: 8249 - protein, 127 aa, Homo sapiens
EVQLVESGGGLVQPGGSLKLSCAASGFRFSDHYMNWVRQAPGKGLEWIGRIRNKANSFITEYAASVKDRFSISRDDSKNSLYLQMHSLKSEDTAMYFCTRDFLEWSRPYYYHFMDVWGKGTTVTVSS

SEQ ID NO: 8250 - protein, 116 aa, Homo sapiens
QLQESGSGLVRPSQTLSLTCAVSGVSISSGTYSWCWIRQPPGEGLQWIGYMSHSGRTYNNPSLKSRVIMSVDRSKNQLSLMLTSVTAADTAVYFCARAARGRLNIWGLGTMVTVSS

SEQ ID NO: 8251 - protein, 118 aa, Homo sapiens
EVQLVESGGGSVQPGGSLRLSCVASGFTFSNFWMSWVRQAPGKGLEWVANIRQDGGERYYVGSARGRFTIARDNANNSLYLQMNSLRVEDTAVYYCTRDSGITRFDYWGQGALVTVSS

SEQ ID NO: 8252 - protein, 129 aa, Homo sapiens
EVQLLESGGGLAQPGGSLRLSCAASGFTFSGYAMTWVRQAPGKGLEWVSGLSRDGADTSYADSVKGRLIISRDNSKNTLYLQIHNLKAEDTAVYYCAKSLFSGTVDDNNGFYFDAFDIWGQGTMVTVSS

SEQ ID NO: 8253 - protein, 117 aa, Homo sapiens
EVQLVESGGGLVQPGGSLSLSCAASGFTFSNFWMSWVRQAPGKGLEWVANIKQDGSEKYYVDSVRGRFTFSRDNANNSLLLQMNSLRADDTAVYYCARTSSAYFDYWGQGVLVTVSS

SEQ ID NO: 8254 - protein, 117 aa, Homo sapiens
EVQLVESGGGLVQPGGSLRLSCAASGFTFSSHWMAWVRQAPGKGLEWVANIKKDGSETNYVDSVKGRFTISRDNAKNALYLQMNSLRVEDTAVYYCAKDAYSVPDYWGQGTLVTVSS

SEQ ID NO: 8255 - protein, 121 aa, Homo sapiens
VQLVQSGPEVKKSGASVKISCKASGYTFSNYAVHWVRQAPGQRPEWMGWSNAGSGATKYSQNFQGRLTIVRDTSANTVFMELSSLTSEDTAVYYCARPVRNGIAPSAIEYWGQGTLVTVSS

SEQ ID NO: 8256 - protein, 119 aa, Homo sapiens
VQLVQSGAEVKKPGESLRISCKASGYTFTTYYITWVRQMTGKGLEWMGRIDPRDSYSNYNPSFEGHVTMSVDKSITTAYLQWSGLKASDTAIYYCARAAGGTLGWFDPWGQGTLVTVSS

SEQ ID NO: 8257 - protein, 125 aa, Homo sapiens
QVQLQESGPGLVKPSETLSLTCSVSGDSMSTFYWSWIRQPPGKGLEWIGFMHHSGSAGYNPSLKSRVAFSVDTSKNQFSLRLTSVTAADTAIYYCATSNLDYMIGWAHRGAFNIWGQGTMVTVSS

SEQ ID NO: 8258 - protein, 124 aa, Homo sapiens
VQLVQSGAEVKKPGSSVKVSCRASGGTFSSFAVSWVRQAPGQGLEWMGGIIGMFGTTKYAQRFLGRVTITADESTSSAYMELSSLTSEDTAVYYCARPGDYRTIRYYHFFMDVWGKGTTVTVSS

SEQ ID NO: 8259 - protein, 123 aa, Homo sapiens
EVQLVESGGGLVQPDGSLRLSCVASGFTFNYYWMMWVRQAPGKGLEWVANINRDGSEKNYVDSVKGRFSISRDSVRNSLYLQMNSLRAEDTAVYYCATDRYEGKWSVDRFNYWGQGTLVTVSS

SEQ ID NO: 8260 - protein, 117 aa, Homo sapiens
EVQLVESGGGLVKPGGSLRLSCAVSGFTFSNAWMSWVRQAPGKGLEWVGRFKSKSGGGTTDYAAPVKGRFTISRDDSKNTLHLQMNSLKTEDTAVYYCIADWHPEYWGQGTLVTVSS

SEQ ID NO: 8261 - protein, 120 aa, Homo sapiens
QLVQSGPEVKKPGTSVKVSCKASGSTFSSSAVQWVRQARGQRPEWIGWIVVGSGNTNYAQNFQDRVTITRDMSTSTAYMELSSLRSEDTAVYYCAAYFGGSASNYGLDVWGQGTTVTVSS

SEQ ID NO: 8262 - protein, 122 aa, Homo sapiens
EVQLVQSGAEVKKPGESLKISCKGSGYSFTSYWIAWVRQMPGKGLEWMGTIHPGDSDTTYGPSFQGQVAISADRSISTAFLEWGSLKASDTAMYYCARPKYSSSSYSGFDVWGQGTMVTVSS

SEQ ID NO: 8263 - protein, 116 aa, Homo sapiens
EVQLVESGGGLVQPGGSLRLSCAASGFTFSRFWMSWVRQAPGKGLEWVANINQDGSEKNYVDSVEGRFTISRDNAKNSLYLQMNSLRAEDTAVYHCAPETYYFDHWGQGILVTVSS

SEQ ID NO: 8264 - protein, 127 aa, Homo sapiens
VQLVESGGGLAQPGGSLRLSCAASGFNFGYYNMHWIRQVPGKGLEWVSGISWNSVHIAYADSVKGRFTISRDNAKDSLYLQMNSLRPDDTALYFCAKDINTAQYCNIVNCYGEFDYWGQGTLVTVSS

SEQ ID NO: 8265 - protein, 131 aa, Homo sapiens
VQLVQSGAEVKKPGASVRVSCTASGYRFTDYYFHWVRQAPGQGLEWMGRINPNTGETNYAQRFQGSVTMTRDTSINTGYMELRRLSLDDTAVYYCARGGYQDSTGYHYDDDGPRYYGLDDWGQGTTVTVSS

SEQ ID NO: 8266 - protein, 131 aa, Homo sapiens
EVQLVESGGGLVTPGGSLRLSCVGSGFNFRGYRMNWVRQAPGKGLEWISYITTDSTTKTYADSVKGRFTISRDNAGSSLHLQMNDLRDEDTAVYFCARDPTPVAGRVRRAISDYQYAMDVWGQGTTVTVSS

SEQ ID NO: 8267 - protein, 122 aa, Homo sapiens
QVQLVESGGGVVQPGRSLRLSCEASGFTFSRFGMHWVRQAPGKGLEWLAVISYDGSHTYYGDSVRGRFTISRDNSKNTLYLQVNSLRPEDTAVYYCAKDADTTGYYDPFDYWGQGTLVTVSS

SEQ ID NO: 8268 - protein, 126 aa, Homo sapiens
QLQESGPGLVNPSETVSLTCTVSGGSISRSRYYWGWVRQPPGKGPEWIASTKTSGHTWYNPSLESRVTISMDTSKNQISLNLRSVTAADTAIYYCATRGVEDCSGIDCSLYYMEVWGKGTTVTVSS

SEQ ID NO: 8269 - protein, 121 aa, Homo sapiens
EVQLVESGGGLEQPGGSLRLSCGVSGFTFSDHSMHWVRQAPGRGLEWLSFISTSGSIRYYADSVKGRFTVSRDNAKNSLYLQMDSLRDEDTALYYCARVAGRGYRDYTDFWGQGTLVTVSS

SEQ ID NO: 8270 - protein, 118 aa, Homo sapiens
QLQESGPGLVKPSETLSLTCSVSGDSVGSGPYCWGWIRQSPGGGLQWIGSICNRGESNYTPTLKSRLAISADTSRNQVSLRLTSVTDADTAVYYCARSSRSFGDYGDWGQGTLVTVSS

SEQ ID NO: 8271 - protein, 121 aa, Homo sapiens
EVQLLESGGGLVQPGGSLRLSCAASGFSFSSYAMSWVRQAPGKGLEWVSAISGSGDSTYDADYVKGRFTISRDNSKNTLYLEMNSLTAEDTAVYYCAKDSVFNFGSRDDHWGQGTLVTVSS

SEQ ID NO: 8272 - protein, 117 aa, Homo sapiens
VQLVESGGGLVKPGGSLRLSCAASGFTFDDYYMSWVRQAPGKGLEWVSYISSSGTIIFYADSVKGRFIVSRDNAKNSLFLEMNSLRDEDTGRYYCARSTVIMPPDVWGQGTTVTVSS

SEQ ID NO: 8273 - protein, 115 aa, Homo sapiens
QVQLQESGPGLVKPSETLSLTCTVSGGSISSYYWSWIRQPPGKGLEWIGYIYYSGSTNYNPSLKSRVTISVDTSKNQFSLKLSSVTAADTAVYYCARGGSGSYGWGQGTLVTVSS

SEQ ID NO: 8274 - protein, 123 aa, Homo sapiens
VQLVQSGAEVKKPGASVKVSCKASGYTFTGYYMHWVRQAPGQGLEWMGWINPNSGGTNYAQKFQGRVTMTRDTSISTAYMELSRLRSDDTAVYYCARANSDRYYYDSSGYSYWGQGTLVTVSS

SEQ ID NO: 8275 - protein, 122 aa, Homo sapiens
VQLVESGGGLVQPGRSLRLSCAASGFTFDDYAMHWVRQAPGKGLEWVAGISWNSGSIGYADSVKGRFTISRDNAKNSLFLQMNSLRAEDTALYSCAKAGIAAAGTNYAFDIWGQGTMVTVSS

SEQ ID NO: 8276 - protein, 125 aa, Homo sapiens
VQLVQSGAEVKKPGSSVKVSCKASGGTFSSYAISWVRQAPGQGLEWMGGIIPIFGTANYAQKFQGRVTITADESTSTAYMELSSLRSEDTAVYYCARVVDIAARPEGYYYYMDVWGKGTTVTVSS

SEQ ID NO: 8277 - protein, 124 aa, Homo sapiens
QVQLVESGGGVVQPGRSLRLSCAASGFTFSSYAMHWVRQAPGKGLEWVTIISYDGSNKYYADSVKGRFTISRDNSKNTLYLQMNSLRAEDTAVYYCARGLGLEWRLSPGYFDYWGQGTLVTVSS

SEQ ID NO: 8278 - protein, 120 aa, Homo sapiens
QVQLVESGGGVVQPGRSLRLSCAASGFTFSSYGMHWVRQAPGKGLEWVAVISYDGSNKYYADSVKGRFTISRDNSKNTLYLQMNSLRAEDTAVYYCAKDSEGYEYYFDYWGQGTLVTVSS

SEQ ID NO: 8279 - protein, 121 aa, Homo sapiens
VQLVESGGGLVKPGGSLRLSCAASGFTFSDYYMSWIRQAPGKGLEWVSYISSSGSTIYYADSVKGRFTISRDNAKNSLYLQMNSLRAEDTAVYYCARDGDSSGWYARFDYWGQGTLVTVSS

SEQ ID NO: 8280 - protein, 123 aa, Homo sapiens
VQLVQSGAEVKKPGSSVKVSCKASGGTFSSYAISWVRQAPGQGLEWMGGIIPMFGAANYAQKFQGRVTITADESTSTAYMELSSLRSEDTAVYYCARARTVGFGESAYYMDVWGKGTTVTVSS

SEQ ID NO: 8281 - protein, 124 aa, Homo sapiens
EVQLVESGGGLVKPGGSLRLSCAASGFTFSNAWMSWVRQAPGKGLEWVGRIKSKTDGGTTDYAAPVKGRFTISRDDSKNTLYLQMNSLKTEDTAVYYCTTDRWGSSYYYYMDVWGKGTTVTVSS

SEQ ID NO: 8282 - protein, 122 aa, Homo sapiens
EVQLVESGGGLVQPGGSLRLSCAASGFTFSSYWMSWVRQAPGKGLEWVAYIKQDGSEKYYVDSVKGRFTISRDNAKNSLYLQMNSLRAEDTAVYYCARDADSSGWYAHFDYWGQGTLVTVSS

SEQ ID NO: 8283 - protein, 124 aa, Homo sapiens
QVQLQESGPGLVKPSQTLSLTCTVSGGSISSGGYYWSWIRQHPGKGLEWIGYIYYSGSTYYNPSLKSRVTISVDTSKNQFSLKLSSVTAADTAVYYCARNPDVYDFGSNWFDPWGQGTLVTVSS

SEQ ID NO: 8284 - protein, 126 aa, Homo sapiens
QVQLQESGPGLVKPSQTLSLTCTVSGGSISSGGYYWSWIRQHPGKGLEWIGYIYYSGSTYYNPSLKSRVTISVDTSKNQFSLKLSSVTAADTAVYYCARAPDDFWSGYWGYYFDYWGQGTLVTVSS

SEQ ID NO: 8285 - protein, 122 aa, Homo sapiens
VQLVQSGAEVKKPGASVKVSCKASGYTFTGYYMHWVRQAPGQGLEWMGWINPNSGGTNYAQKFQGRVTMTRDTSISTAYMELSRLRSDDTAVYYCARGLHSSSDYYYGMDVWGQGTTVTVSS

SEQ ID NO: 8286 - protein, 119 aa, Homo sapiens
EVQLVESGGDLVEPGGSLRLSCAASGFNFNIAWMNWVRQAPGKGLEWVGRIKSNTDGGTTDYAAPVKGRFTISRDDSKYTLFLQMNRLQTEDTAVYYCTTDPYPTFGYWGQGTLVTVSS

SEQ ID NO: 8287 - protein, 124 aa, Homo sapiens
QVQLVESGGGVVQPGRSLRLSCAASGFTFSSYGIHWVRQAPGKGLEWVAVISYDGSNKYYADSVKGRFTISRDNSKNTLYLQMNSLRAEDTAMYYCAKDYTPYALEWLPLFDYWGQGTLVTVSS

SEQ ID NO: 8288 - protein, 110 aa, Homo sapiens
VMTQSPLSLPVTLGQPASISCRSSQGLVSSDGTTYLSWYQQRPGQSPRRLFYKVSERDSGVPDRFSGSGSGTDFTLKISRVEAEDVGVYYCLQGTHWPRTFGQGTKVEIK

SEQ ID NO: 8289 - protein, 113 aa, Homo sapiens
DIVMTQSPDFLAVSLGERATINCKSSQNVLYNSNNKNYLAWYQQIPGQPPKLVIYWASTRESGVPDRFSGNGSGTDFTLTISSLQAEDVAVYYCQQYYTTPPTFGQGTKVEIK

SEQ ID NO: 8290 - protein, 109 aa, Homo sapiens
DIQMTQSPSSLSASVGDRVTITCQASQDISNSLNWYQQKPGKAPKLLIYDASNLETGVPSRFSGSGSGTHFTFTISSLQPEDIGTYYCQQYDNLPPIFTFGPGTKVDIK

SEQ ID NO: 8291 - protein, 110 aa, Homo sapiens
VMTQSPLSLPVTLGQPASISCRSSQSLVYSDGNTYLNWFQQRPGQSPRRLIYRVSKRDSGVPDRFSGSGSGSDFTLKISRVEAEDVGVYYCMQGTHWPPAFGQGTRLEIK

SEQ ID NO: 8292 - protein, 109 aa, Homo sapiens
EIVLTQSPATLSLSPGERATLSCRASQSVSRSLAWYQQKPGQAPRLLIYGASNRVTGIPARFSGSGSGTDFTLTISSLEPEDFAFYYCQQRSNWPPTLTFGGGTKVEIK

SEQ ID NO: 8293 - protein, 107 aa, Homo sapiens
EIVLTQSPPTLSLSPGEGATLSCRASQSVSGSLAWYQQKPGQAPRLLIYDTSKRATGIPARFSGSGSGTDFTLTISSLEPEDFAVYYCQQRSNWPQTFGQGTKVEIK

SEQ ID NO: 8294 - protein, 113 aa, Homo sapiens
DIVMTQSPDSLAVSLGERATINCKSSRSLLSSSNNKNYLAWYQQKSGQPPRLLMFWASARESGVPDRFSGSGSGTDFTLTISSLQAEDVAVYYCQHYYTEPETFGQGTKVEIK

SEQ ID NO: 8295 - protein, 112 aa, Homo sapiens
DIVMTQSPDSLAVSLGERATINCKSSQSVFYRSTNKNYLAWYQQKPGQPPKLLIHWASTRESGVPDRFSGSGSGTDFTLTISSLQAEDVAVYYCQQYYNTITFGPGTKVDIK

SEQ ID NO: 8296 - protein, 107 aa, Homo sapiens
DIQMTQSPSTLSASVGDRVTITCRASQSISSWLAWYQQKPGKAPKLLIYKASSLESGVPSRFSGSGSGTEFTLTISSLQPDDFATYYCQQYNSYPRTFGQGTKVEIK

SEQ ID NO: 8297 - protein, 107 aa, Homo sapiens
DIQMTQSPSTLSASVGDRVTITCRASQDIGNWLAWYQQKPGKAPSLLIYDVSTLQSGVPSRFSGRRSGTEFTLTISSLQPDDLATYYCQQYNSYLFTFGPGTKVDIK

SEQ ID NO: 8298 - protein, 109 aa, Homo sapiens
EIVLTQSPGTLSLSPGERATLSCRASQSVSSSYLAWYQQKPGQAPRLLIYGTSSRATGIPDRFSGSGSGTDFTLTISRLEPEDFAVYYCQQYGSSPPATFGQGTKVEIK

SEQ ID NO: 8299 - protein, 107 aa, Homo sapiens
DIQMTQSPSSLSASVGDRVTITCRASQGINNDVAWFQQKPGKAPKSLINAASSLQSGVPSKFSGSGSGTDFTLTISNLQPEDFATYYCQQYNSYPLTFGGGTKVEIK

SEQ ID NO: 8300 - protein, 111 aa, Homo sapiens
VMTQSPLSLPVTLGQPASISCRSSQSLVYSDGNTYLNWFQQRPGQSPRRLIYMVSNRDSGVPDRFSGSGSGTDFTLKISRVEAEDVGVYYCMQTALWPPNTFGQGTKVEIK

SEQ ID NO: 8301 - protein, 112 aa, Homo sapiens
DIVMTQSPLSLPVTPGEPASISCRSSQSLLHNNGYNYLDWYLQKPGQSPHLLIYLGSNRASGVPDRFSGSGSGTDFTLEISRVEAEDVGVYYCMQASQTPQTFGGGTKVEIK

SEQ ID NO: 8302 - protein, 107 aa, Homo sapiens
DIQLTQSPSFLSASVGDRVTITCRASQGISSYLAWYQQKPGKAPKLLIYAASTLQSGVPARFSGSGSGTEFTLTISRLQPEDFATFYCQQLHSSPLTFGGGTKVEIK

SEQ ID NO: 8303 - protein, 106 aa, Homo sapiens
EIVLTQSPATLVLSPGERATLSCRASHFVNTFLAWYQQKPGQSPRLLISDATIRATGIPARFSGSGSGTDFTLTISSLEPEDCAVYYCQQRSQLVTFGGGTKVEIK

SEQ ID NO: 8304 - protein, 106 aa, Homo sapiens
DIQMTQSPSTLSASVGDVVTITCRASQSISSWLAWFQQRPGKAPKPLIYRASRLQSGVPSRFSGSGSGTEFTLTISSLQPDDFATYYCQQYDTYPTFGGGTKVEIK

SEQ ID NO: 8305 - protein, 107 aa, Homo sapiens
DIQMTQSPSSLSASIGDRISITCRASQTIGSYLNWYQHKPGKAPKLLISAASTLQSGVPSRFSGSGSGTGFTLTISSLQPDDSATYYCQQSYTPLITFGRGTRLEIK

SEQ ID NO: 8306 - protein, 109 aa, Homo sapiens
EIVLTQSPGTLSLSPGERASLSCRASQSINNRYLAWYQQTPGQAPRLLIFGASNRATGIPNRFSGSGSGTDFTLTISRLEPEDFAVYYCQHYGASPLYNFGQGTKVEIK

SEQ ID NO: 8307 - protein, 106 aa, Homo sapiens
DIQMTQSPSTLSAPVGDRVTITCRASQGINNWLAWYQQKPGKAPKLLIYQASTLESGVPSRFSGSGSGTEFTLTISSLQPEDFATYYCQQYHEYHSFGQGTKVEIK

SEQ ID NO: 8308 - protein, 107 aa, Homo sapiens
EIVMTQSPATLSVSPGDRATLSCRASQSVGSTLAWYQQKPGQAPRLLIYAASSRATGVPARFSGSGSGREFTLTINSLQSEDFAVYYCQKYDNWPVTFGGGTKVEIK

SEQ ID NO: 8309 - protein, 107 aa, Homo sapiens
DIQMTQSPSSLSASVGDRVTITCRASRDISDYLAWFQQKPGEAPKPLIYGASSLQSGVPSRFSGSGSGTDFTFTISSLQPEDFGTYFCQQYNSYPRTFGQGTKVEIK

SEQ ID NO: 8310 - protein, 106 aa, Homo sapiens; identical to SEQ ID NO: 8303

SEQ ID NO: 8311 - protein, 107 aa, Homo sapiens
EIVLTQSPATLSLSPGERATLPCRASQSVGSSLVWYQQKPGQAPRLLIYDASNRATGIPARFSGSGSGTDFTLTISSLEPEDFAVYYCHQRYNWPRTFGQGTKVEIK

SEQ ID NO: 8312 - protein, 107 aa, Homo sapiens
DIQMTQSPSSLSASVGDRVTITCRASQDISNYLNWYQQKPGKAPKLLIYAASNLQTGVPSRFSGSGFGTDFTFTISSLQPEDFATYYCQQNHNVLFNFGPGTKVDIK

SEQ ID NO: 8313 - protein, 107 aa, Homo sapiens
DIQMTQSPSSLSASVGDRVTITCRASQGISNYLAWFQQKPGKAPKSLIYAASSLQSGVPSKFSGSGSGTDFTLTISSLQPEDFATYYCQQYNSYPPTFGQGTKVEIK

SEQ ID NO: 8314 - protein, 107 aa, Homo sapiens
DIQMTQSPSSLSASVGDRVTITCRASQSISSYLNWYQQKPGKAPKLLIYAASSLQSGVPSRFSGSGSGTDFTLTISSLQPEDFATYYCQQSYSTPITFGQGTRLEIK

SEQ ID NO: 8315 - protein, 109 aa, Homo sapiens
EIVMTQSPATLSVSPGERATLSCRASQSVSSNLAWYQQKPGQAPRLLIYGASTRATGIPARFSGSGSGTEFTLTISSLQSEDFAVYYCQQYNNWPPPVTFGQGTRLEIK

SEQ ID NO: 8316 - protein, 111 aa, Homo sapiens
DIVMTQSPLSLPVTPGEPASISCRSSQSLLHSNGYNYLDWYLQKPGQSPQLLIYLGSNRASGVPDRFSGSGSGTDFTLKISRVEAEDVGVYYCMQALQTWTFGQGTKVEIK

SEQ ID NO: 8317 - protein, 107 aa, Homo sapiens
EIVMTQSPATLSVSPGERATLSCRASQSVSSNLAWYQQKPGQAPRLLIYGASTRATGIPARFSGSGSGTEFTLTISSLQSEDFAVYYCQQYNNWPGTFGPGTKVDIK

SEQ ID NO: 8318 - protein, 107 aa, Homo sapiens [sequence omitted]

SEQ ID NO: 8319 - protein, 108 aa, Homo sapiens
EIVMTQSPATLSVSPGERATLSCRASQSVSSNLAWYQQKPGQAPRLLIYGASTRATGIPARFSGSGSGTEFTLTISSLQSEDFAVYYCQQYNNWPPWTFGQGTKVEIK

SEQ ID NO: 8320 - protein, 111 aa, Homo sapiens
DIVMTQSPLSLPVTPGEPASISCRSSQSLLHSNGYNYLDWYLQKPGQSPQLLIYLGSNRASGVPDRFSGSGSGTDFTLKISRVEAEDVGVYYCMQALHPCSFGQGTKVEIK

SEQ ID NO: 8321 - protein, 112 aa, Homo sapiens
DIVMTQSPLSLPVTPGEPASISCRSSQSLLHSNGYNYLDWYLQKPGQSPQLLIYLGSNRASGVPDRFSGSGSGTDFTLKISRVEAEDVGVYYCMQALQTTWTFGQGTKVEIK

SEQ ID NO: 8322 - protein, 108 aa, Homo sapiens; identical to SEQ ID NO: 8319

SEQ ID NO: 8323 - protein, 107 aa, Homo sapiens
DIQMTQSPSSLSASVGDRVTITCRASQGISNYLAWYQQKPGKVPKLLIYAASTLQSGVPSRFSGSGSGTDFTLTISSLQPEDVATYYCQKYNSAPFTFGQGTRLEIK

SEQ ID NO: 8324 - protein, 107 aa, Homo sapiens
DIQMTQSPSTLSASVGDRVTITCRANQTISTWLAWYQQKPGKAPKLLIYKASNFASGVPSRFSGSGSGTEFTLTISSLQPDDFASYYCQQYNSYWWTFGQGTKVEIK

SEQ ID NO: 8325 - protein, 108 aa, Homo sapiens
EIVMTQSPATLSVSPGERAALSCRASQSVSRNLAWYQQKPGQAPRLLIYGASTRATGIPARFSGSGSGTEFTLTISSLQSEDFAVYYCQQYNKWPPLTFGGGTKVEIK

SEQ ID NO: 8326 - protein, 107 aa, Homo sapiens
DIQMTQSPSSLSASVGDRVTITCQASQDISNYLNWYQQKPGKAPKLLIYDASNLETGVPSRFSGSGSGTDFTFTISSLQPEDIATYYCQQYDNLPLTFGGGTKVEIK

SEQ ID NO: 8327 - protein, 107 aa, Homo sapiens
EIVLTQSPGTLSLSPGERATLSCRASQSVSSSYLAWYQQKPGQAPRLLIYGASSRATGIPDRFSGSGSGTDFTLTISRLEPEDFAVYYCQQYGSSGTFGQGTKVEIK

SEQ ID NO: 8328 - protein, 98 aa, Homo sapiens; identical to SEQ ID NO: 2645

SEQ ID NO: 8329 - protein, 98 aa, Homo sapiens
VMTQSPLSLPVTLGQPASISCRSSQGLVSSDGTTYLSWYQQRPGQSPRRLFYKVSERDSGVPDRFSGSGSGTDFTLKISRVEAEDVGVYYCLQGTHWP

SEQ ID NO: 8330 - protein, 100 aa, Homo sapiens
EVQLVESGGGLVQPGGSLKLSCAASGFRFSDHYMNWVRQAPGKGLEWIGRIRNKANSFITEYAASVKDRFSISRDDSKNSLYLQMHSLKSEDTAMYFCTR

SEQ ID NO: 8331 - protein, 101 aa, Homo sapiens
DIVMTQSPDFLAVSLGERATINCKSSQNVLYNSNNKNYLAWYQQIPGQPPKLVIYWASTRESGVPDRFSGNGSGTDFTLTISSLQAEDVAVYYCQQYYTTP

SEQ ID NO: 8332 - protein, 97 aa, Homo sapiens
QLQESGSGLVRPSQTLSLTCAVSGVSISSGTYSWCWIRQPPGEGLQWIGYMSHSGRTYNNPSLKSRVIMSVDRSKNQLSLMLTSVTAADTAVYFCAR

SEQ ID NO: 8333 - protein, 95 aa, Homo sapiens
DIQMTQSPSSLSASVGDRVTITCQASQDISNSLNWYQQKPGKAPKLLIYDASNLETGVPSRFSGSGSGTHFTFTISSLQPEDIGTYYCQQYDNLP

SEQ ID NO: 8334 - protein, 98 aa, Homo sapiens
EVQLVESGGGSVQPGGSLRLSCVASGFTFSNFWMSWVRQAPGKGLEWVANIRQDGGERYYVGSARGRFTIARDNANNSLYLQMNSLRVEDTAVYYCTR

SEQ ID NO: 8335 - protein, 98 aa, Homo sapiens
VMTQSPLSLPVTLGQPASISCRSSQSLVYSDGNTYLNWFQQRPGQSPRRLIYRVSKRDSGVPDRFSGSGSGSDFTLKISRVEAEDVGVYYCMQGTHWP

SEQ ID NO: 8336 - protein, 98 aa, Homo sapiens
EVQLLESGGGLAQPGGSLRLSCAASGFTFSGYAMTWVRQAPGKGLEWVSGLSRDGADTSYADSVKGRLIISRDNSKNTLYLQIHNLKAEDTAVYYCAK

SEQ ID NO: 8337 - protein, 95 aa, Homo sapiens
EIVLTQSPATLSLSPGERATLSCRASQSVSRSLAWYQQKPGQAPRLLIYGASNRVTGIPARFSGSGSGTDFTLTISSLEPEDFAFYYCQQRSNWP

SEQ ID NO: 8338 - protein, 98 aa, Homo sapiens
EVQLVESGGGLVQPGGSLSLSCAASGFTFSNFWMSWVRQAPGKGLEWVANIKQDGSEKYYVDSVRGRFTFSRDNANNSLLLQMNSLRADDTAVYYCAR

SEQ ID NO: 8339 - protein, 95 aa, Homo sapiens
EIVLTQSPPTLSLSPGEGATLSCRASQSVSGSLAWYQQKPGQAPRLLIYDTSKRATGIPARFSGSGSGTDFTLTISSLEPEDFAVYYCQQRSNWP

SEQ ID NO: 8340 - protein, 98 aa, Homo sapiens
EVQLVESGGGLVQPGGSLRLSCAASGFTFSSHWMAWVRQAPGKGLEWVANIKKDGSETNYVDSVKGRFTISRDNAKNALYLQMNSLRVEDTAVYYCAK

SEQ ID NO: 8341 - protein, 101 aa, Homo sapiens
DIVMTQSPDSLAVSLGERATINCKSSRSLLSSSNNKNYLAWYQQKSGQPPRLLMFWASARESGVPDRFSGSGSGTDFTLTISSLQAEDVAVYYCQHYYTEP

SEQ ID NO: 8342 - protein, 97 aa, Homo sapiens
VQLVQSGPEVKKSGASVKISCKASGYTFSNYAVHWVRQAPGQRPEWMGWSNAGSGATKYSQNFQGRLTIVRDTSANTVFMELSSLTSEDTAVYYCAR

SEQ ID NO: 8343 - protein, 99 aa, Homo sapiens
DIVMTQSPDSLAVSLGERATINCKSSQSVFYRSTNKNYLAWYQQKPGQPPKLLIHWASTRESGVPDRFSGSGSGTDFTLTISSLQAEDVAVYYCQQYYN

SEQ ID NO: 8344 - protein, 97 aa, Homo sapiens
VQLVQSGAEVKKPGESLRISCKASGYTFTTYYITWVRQMTGKGLEWMGRIDPRDSYSNYNPSFEGHVTMSVDKSITTAYLQWSGLKASDTAIYYCAR

SEQ ID NO: 8345 - protein, 94 aa, Homo sapiens
DIQMTQSPSTLSASVGDRVTITCRASQSISSWLAWYQQKPGKAPKLLIYKASSLESGVPSRFSGSGSGTEFTLTISSLQPDDFATYYCQQYNSY

SEQ ID NO: 8346 - protein, 96 aa, Homo sapiens
QVQLQESGPGLVKPSETLSLTCSVSGDSMSTFYWSWIRQPPGKGLEWIGFMHHSGSAGYNPSLKSRVAFSVDTSKNQFSLRLTSVTAADTAIYYCA

SEQ ID NO: 8347 - protein, 94 aa, Homo sapiens
DIQMTQSPSTLSASVGDRVTITCRASQDIGNWLAWYQQKPGKAPSLLIYDVSTLQSGVPSRFSGRRSGTEFTLTISSLQPDDLATYYCQQYNSY

SEQ ID NO: 8348 - protein, 97 aa, Homo sapiens
VQLVQSGAEVKKPGSSVKVSCRASGGTFSSFAVSWVRQAPGQGLEWMGGIIGMFGTTKYAQRFLGRVTITADESTSSAYMELSSLTSEDTAVYYCAR

SEQ ID NO: 8349 - protein, 96 aa, Homo sapiens
EIVLTQSPGTLSLSPGERATLSCRASQSVSSSYLAWYQQKPGQAPRLLIYGTSSRATGIPDRFSGSGSGTDFTLTISRLEPEDFAVYYCQQYGSSP

SEQ ID NO: 8350 - protein, 98 aa, Homo sapiens
EVQLVESGGGLVQPDGSLRLSCVASGFTFNYYWMMWVRQAPGKGLEWVANINRDGSEKNYVDSVKGRFSISRDSVRNSLYLQMNSLRAEDTAVYYCAT

SEQ ID NO: 8351 - protein, 94 aa, Homo sapiens
DIQMTQSPSSLSASVGDRVTITCRASQGINNDVAWFQQKPGKAPKSLINAASSLQSGVPSKFSGSGSGTDFTLTISNLQPEDFATYYCQQYNSY

SEQ ID NO: 8352 - protein, 98 aa, Homo sapiens
EVQLVESGGGLVKPGGSLRLSCAVSGFTFSNAWMSWVRQAPGKGLEWVGRFKSKSGGGTTDYAAPVKGRFTISRDDSKNTLHLQMNSLKTEDTAVYYC

SEQ ID NO: 8353 - protein, 98 aa, Homo sapiens
VMTQSPLSLPVTLGQPASISCRSSQSLVYSDGNTYLNWFQQRPGQSPRRLIYMVSNRDSGVPDRFSGSGSGTDFTLKISRVEAEDVGVYYCMQTALWP

SEQ ID NO: 8354 - protein, 96 aa, Homo sapiens
QLVQSGPEVKKPGTSVKVSCKASGSTFSSSAVQWVRQARGQRPEWIGWIVVGSGNTNYAQNFQDRVTITRDMSTSTAYMELSSLRSEDTAVYYCAA

SEQ ID NO: 8355 - protein, 100 aa, Homo sapiens
DIVMTQSPLSLPVTPGEPASISCRSSQSLLHNNGYNYLDWYLQKPGQSPHLLIYLGSNRASGVPDRFSGSGSGTDFTLEISRVEAEDVGVYYCMQASQTP

SEQ ID NO: 8356 - protein, 97 aa, Homo sapiens
EVQLVQSGAEVKKPGESLKISCKGSGYSFTSYWIAWVRQMPGKGLEWMGTIHPGDSDTTYGPSFQGQVAISADRSISTAFLEWGSLKASDTAMYYCA

SEQ ID NO: 8357 - protein, 94 aa, Homo sapiens
DIQLTQSPSFLSASVGDRVTITCRASQGISSYLAWYQQKPGKAPKLLIYAASTLQSGVPARFSGSGSGTEFTLTISRLQPEDFATFYCQQLHSS

SEQ ID NO: 8358 - protein, 98 aa, Homo sapiens
EVQLVESGGGLVQPGGSLRLSCAASGFTFSRFWMSWVRQAPGKGLEWVANINQDGSEKNYVDSVEGRFTISRDNAKNSLYLQMNSLRAEDTAVYHCAP

SEQ ID NO: 8359 - protein, 91 aa, Homo sapiens
EIVLTQSPATLVLSPGERATLSCRASHFVNTFLAWYQQKPGQSPRLLISDATIRATGIPARFSGSGSGTDFTLTISSLEPEDCAVYYCQQR

SEQ ID NO: 8360 - protein, 98 aa, Homo sapiens
VQLVESGGGLAQPGGSLRLSCAASGFNFGYYNMHWIRQVPGKGLEWVSGISWNSVHIAYADSVKGRFTISRDNAKDSLYLQMNSLRPDDTALYFCAKD

SEQ ID NO: 8361 - protein, 94 aa, Homo sapiens
DIQMTQSPSTLSASVGDVVTITCRASQSISSWLAWFQQRPGKAPKPLIYRASRLQSGVPSRFSGSGSGTEFTLTISSLQPDDFATYYCQQYDTY

SEQ ID NO: 8362 - protein, 97 aa, Homo sapiens
VQLVQSGAEVKKPGASVRVSCTASGYRFTDYYFHWVRQAPGQGLEWMGRINPNTGETNYAQRFQGSVTMTRDTSINTGYMELRRLSLDDTAVYYCAR

SEQ ID NO: 8363 - protein, 94 aa, Homo sapiens
DIQMTQSPSSLSASIGDRISITCRASQTIGSYLNWYQHKPGKAPKLLISAASTLQSGVPSRFSGSGSGTGFTLTISSLQPDDSATYYCQQSYTP

SEQ ID NO: 8364 - protein, 98 aa, Homo sapiens
EVQLVESGGGLVTPGGSLRLSCVGSGFNFRGYRMNWVRQAPGKGLEWISYITTDSTTKTYADSVKGRFTISRDNAGSSLHLQMNDLRDEDTAVYFCAR

SEQ ID NO: 8365 - protein, 95 aa, Homo sapiens
EIVLTQSPGTLSLSPGERASLSCRASQSINNRYLAWYQQTPGQAPRLLIFGASNRATGIPNRFSGSGSGTDFTLTISRLEPEDFAVYYCQHYGAS

SEQ ID NO: 8366 - protein, 98 aa, Homo sapiens
QVQLVESGGGVVQPGRSLRLSCEASGFTFSRFGMHWVRQAPGKGLEWLAVISYDGSHTYYGDSVRGRFTISRDNSKNTLYLQVNSLRPEDTAVYYCAK

SEQ ID NO: 8367 - protein, 94 aa, Homo sapiens
DIQMTQSPSTLSAPVGDRVTITCRASQGINNWLAWYQQKPGKAPKLLIYQASTLESGVPSRFSGSGSGTEFTLTISSLQPEDFATYYCQQYHEY

SEQ ID NO: 8368 - protein, 96 aa, Homo sapiens
QLQESGPGLVNPSETVSLTCTVSGGSISRSRYYWGWVRQPPGKGPEWIASTKTSGHTWYNPSLESRVTISMDTSKNQISLNLRSVTAADTAIYYCA

SEQ ID NO: 8369 - protein, 94 aa, Homo sapiens
EIVMTQSPATLSVSPGDRATLSCRASQSVGSTLAWYQQKPGQAPRLLIYAASSRATGVPARFSGSGSGREFTLTINSLQSEDFAVYYCQKYDNW

SEQ ID NO: 8370 - protein, 98 aa, Homo sapiens
EVQLVESGGGLEQPGGSLRLSCGVSGFTFSDHSMHWVRQAPGRGLEWLSFISTSGSIRYYADSVKGRFTVSRDNAKNSLYLQMDSLRDEDTALYYCAR

SEQ ID NO: 8371 - protein, 95 aa, Homo sapiens
DIQMTQSPSSLSASVGDRVTITCRASRDISDYLAWFQQKPGEAPKPLIYGASSLQSGVPSRFSGSGSGTDFTFTISSLQPEDFGTYFCQQYNSYP

SEQ ID NO: 8372 - protein, 97 aa, Homo sapiens
QLQESGPGLVKPSETLSLTCSVSGDSVGSGPYCWGWIRQSPGGGLQWIGSICNRGESNYTPTLKSRLAISADTSRNQVSLRLTSVTDADTAVYYCAR

SEQ ID NO: 8373 - protein, 91 aa, Homo sapiens; identical to SEQ ID NO: 8359

SEQ ID NO: 8374 - protein, 98 aa, Homo sapiens
EVQLLESGGGLVQPGGSLRLSCAASGFSFSSYAMSWVRQAPGKGLEWVSAISGSGDSTYDADYVKGRFTISRDNSKNTLYLEMNSLTAEDTAVYYCAK

SEQ ID NO: 8375 - protein, 95 aa, Homo sapiens
EIVLTQSPATLSLSPGERATLPCRASQSVGSSLVWYQQKPGQAPRLLIYDASNRATGIPARFSGSGSGTDFTLTISSLEPEDFAVYYCHQRYNWP

SEQ ID NO: 8376 - protein, 97 aa, Homo sapiens
VQLVESGGGLVKPGGSLRLSCAASGFTFDDYYMSWVRQAPGKGLEWVSYISSSGTIIFYADSVKGRFIVSRDNAKNSLFLEMNSLRDEDTGRYYCAR

SEQ ID NO: 8377 - protein, 94 aa, Homo sapiens
DIQMTQSPSSLSASVGDRVTITCRASQDISNYLNWYQQKPGKAPKLLIYAASNLQTGVPSRFSGSGFGTDFTFTISSLQPEDFATYYCQQNHNV

SEQ ID NO: 8378 - protein, 97 aa, Homo sapiens
QVQLQESGPGLVKPSETLSLTCTVSGGSISSYYWSWIRQPPGKGLEWIGYIYYSGSTNYNPSLKSRVTISVDTSKNQFSLKLSSVTAADTAVYYCAR

SEQ ID NO: 8379 - protein, 95 aa, Homo sapiens
DIQMTQSPSSLSASVGDRVTITCRASQGISNYLAWFQQKPGKAPKSLIYAASSLQSGVPSKFSGSGSGTDFTLTISSLQPEDFATYYCQQYNSYP

SEQ ID NO: 8380 - protein, 97 aa, Homo sapiens
VQLVQSGAEVKKPGASVKVSCKASGYTFTGYYMHWVRQAPGQGLEWMGWINPNSGGTNYAQKFQGRVTMTRDTSISTAYMELSRLRSDDTAVYYCAR

SEQ ID NO: 8381 - protein, 94 aa, Homo sapiens
DIQMTQSPSSLSASVGDRVTITCRASQSISSYLNWYQQKPGKAPKLLIYAASSLQSGVPSRFSGSGSGTDFTLTISSLQPEDFATYYCQQSYST

SEQ ID NO: 8382 - protein, 97 aa, Homo sapiens
VQLVESGGGLVQPGRSLRLSCAASGFTFDDYAMHWVRQAPGKGLEWVAGISWNSGSIGYADSVKGRFTISRDNAKNSLFLQMNSLRAEDTALYSCAK

SEQ ID NO: 8383 - protein, 95 aa, Homo sapiens
EIVMTQSPATLSVSPGERATLSCRASQSVSSNLAWYQQKPGQAPRLLIYGASTRATGIPARFSGSGSGTEFTLTISSLQSEDFAVYYCQQYNNWP

SEQ ID NO: 8384 - protein, 97 aa, Homo sapiens
VQLVQSGAEVKKPGSSVKVSCKASGGTFSSYAISWVRQAPGQGLEWMGGIIPIFGTANYAQKFQGRVTITADESTSTAYMELSSLRSEDTAVYYCAR

SEQ ID NO: 8385 - protein, 98 aa, Homo sapiens
DIVMTQSPLSLPVTPGEPASISCRSSQSLLHSNGYNYLDWYLQKPGQSPQLLIYLGSNRASGVPDRFSGSGSGTDFTLKISRVEAEDVGVYYCMQALQ

SEQ ID NO: 8386 - protein, 97 aa, Homo sapiens
QVQLVESGGGVVQPGRSLRLSCAASGFTFSSYAMHWVRQAPGKGLEWVTIISYDGSNKYYADSVKGRFTISRDNSKNTLYLQMNSLRAEDTAVYYCA

SEQ ID NO: 8387 - protein, 94 aa, Homo sapiens; identical to SEQ ID NO: 224

SEQ ID NO: 8388 - protein, 98 aa, Homo sapiens
QVQLVESGGGVVQPGRSLRLSCAASGFTFSSYGMHWVRQAPGKGLEWVAVISYDGSNKYYADSVKGRFTISRDNSKNTLYLQMNSLRAEDTAVYYCAK

SEQ ID NO: 8389 - protein, 94 aa, Homo sapiens
DIQMTQSPSSLSASVGDRVTITCRASQSISSSLNWYQQKPGKAPKLLIYAASSLQSGVPSRFSGSGSGTDFTLTISSLQPEDFATYYCQQSYST

SEQ ID NO: 8390 - protein, 97 aa, Homo sapiens
VQLVESGGGLVKPGGSLRLSCAASGFTFSDYYMSWIRQAPGKGLEWVSYISSSGSTIYYADSVKGRFTISRDNAKNSLYLQMNSLRAEDTAVYYCAR

SEQ ID NO: 8391 - protein, 95 aa, Homo sapiens; identical to SEQ ID NO: 8383

SEQ ID NO: 8392 - protein, 97 aa, Homo sapiens
VQLVQSGAEVKKPGSSVKVSCKASGGTFSSYAISWVRQAPGQGLEWMGGIIPMFGAANYAQKFQGRVTITADESTSTAYMELSSLRSEDTAVYYCAR

SEQ ID NO: 8393 - protein, 97 aa, Homo sapiens
DIVMTQSPLSLPVTPGEPASISCRSSQSLLHSNGYNYLDWYLQKPGQSPQLLIYLGSNRASGVPDRFSGSGSGTDFTLKISRVEAEDVGVYYCMQAL

SEQ ID NO: 8394 - protein, 100 aa, Homo sapiens
EVQLVESGGGLVKPGGSLRLSCAASGFTFSNAWMSWVRQAPGKGLEWVGRIKSKTDGGTTDYAAPVKGRFTISRDDSKNTLYLQMNSLKTEDTAVYYCTT

SEQ ID NO: 8395 - protein, 99 aa, Homo sapiens
DIVMTQSPLSLPVTPGEPASISCRSSQSLLHSNGYNYLDWYLQKPGQSPQLLIYLGSNRASGVPDRFSGSGSGTDFTLKISRVEAEDVGVYYCMQALQT

SEQ ID NO: 8396 - protein, 98 aa, Homo sapiens
EVQLVESGGGLVQPGGSLRLSCAASGFTFSSYWMSWVRQAPGKGLEWVAYIKQDGSEKYYVDSVKGRFTISRDNAKNSLYLQMNSLRAEDTAVYYCAR

SEQ ID NO: 8397 - protein, 95 aa, Homo sapiens; identical to SEQ ID NO: 8383

SEQ ID NO: 8398 - protein, 99 aa, Homo sapiens
QVQLQESGPGLVKPSQTLSLTCTVSGGSISSGGYYWSWIRQHPGKGLEWIGYIYYSGSTYYNPSLKSRVTISVDTSKNQFSLKLSSVTAADTAVYYCAR

SEQ ID NO: 8399 - protein, 99 aa, Homo sapiens; identical to SEQ ID NO: 8398

SEQ ID NO: 8400 - protein, 97 aa, Homo sapiens; identical to SEQ ID NO: 8380

SEQ ID NO: 8401 - protein, 94 aa, Homo sapiens
DIQMTQSPSSLSASVGDRVTITCRASQGISNYLAWYQQKPGKVPKLLIYAASTLQSGVPSRFSGSGSGTDFTLTISSLQPEDVATYYCQKYNSA

SEQ ID NO: 8402 - protein, 100 aa, Homo sapiens
EVQLVESGGDLVEPGGSLRLSCAASGFNFNIAWMNWVRQAPGKGLEWVGRIKSNTDGGTTDYAAPVKGRFTISRDDSKYTLFLQMNRLQTEDTAVYYCTT

SEQ ID NO: 8403 - protein, 94 aa, Homo sapiens
DIQMTQSPSTLSASVGDRVTITCRANQTISTWLAWYQQKPGKAPKLLIYKASNFASGVPSRFSGSGSGTEFTLTISSLQPDDFASYYCQQYNSY

SEQ ID NO: 8404 - protein, 98 aa, Homo sapiens
QVQLVESGGGVVQPGRSLRLSCAASGFTFSSYGIHWVRQAPGKGLEWVAVISYDGSNKYYADSVKGRFTISRDNSKNTLYLQMNSLRAEDTAMYYCAK

SEQ ID NO: 8405 - protein, 95 aa, Homo sapiens
EIVMTQSPATLSVSPGERAALSCRASQSVSRNLAWYQQKPGQAPRLLIYGASTRATGIPARFSGSGSGTEFTLTISSLQSEDFAVYYCQQYNKWP

SEQ ID NO: 8406 - protein, 94 aa, Homo sapiens
DIQMTQSPSSLSASVGDRVTITCQASQDISNYLNWYQQKPGKAPKLLIYDASNLETGVPSRFSGSGSGTDFTFTISSLQPEDIATYYCQQYDNL

SEQ ID NO: 8407 - protein, 95 aa, Homo sapiens
EIVLTQSPGTLSLSPGERATLSCRASQSVSSSYLAWYQQKPGQAPRLLIYGASSRATGIPDRFSGSGSGTDFTLTISRLEPEDFAVYYCQQYGSS

SEQ ID NO: 8408 - protein, 25 aa, Homo sapiens
EVQLVESGGGWVQPGGSLRLSCEAS

SEQ ID NO: 8409 - protein, 24 aa, Homo sapiens
VMTQSPLSLPVTLGQPASISCRSS

SEQ ID NO: 8410 - protein, 25 aa, Homo sapiens
EVQLVESGGGLVQPGGSLKLSCAAS

SEQ ID NO: 8411 - protein, 26 aa, Homo sapiens
DIVMTQSPDFLAVSLGERATINCKSS

SEQ ID NO: 8412 - protein, 23 aa, Homo sapiens
QLQESGSGLVRPSQTLSLTCAVS

SEQ ID NO: 8413 - protein, 26 aa, Homo sapiens
DIQMTQSPSSLSASVGDRVTITCQAS

SEQ ID NO: 8414 - protein, 25 aa, Homo sapiens
EVQLVESGGGSVQPGGSLRLSCVAS

SEQ ID NO: 8415 - protein, 24 aa, Homo sapiens
VMTQSPLSLPVTLGQPASISCRSS

SEQ ID NO: 8416 - protein, 25 aa, Homo sapiens
EVQLLESGGGLAQPGGSLRLSCAAS

SEQ ID NO: 8417 - protein, 26 aa, Homo sapiens [sequence omitted]

SEQ ID NO: 8418 - protein, 25 aa, Homo sapiens
EVQLVESGGGLVQPGGSLSLSCAAS

SEQ ID NO: 8419 - protein, 26 aa, Homo sapiens
EIVLTQSPPTLSLSPGEGATLSCRAS

SEQ ID NO: 8420 - protein, 25 aa, Homo sapiens [sequence omitted]

SEQ ID NO: 8421 - protein, 26 aa, Homo sapiens
DIVMTQSPDSLAVSLGERATINCKSS

SEQ ID NO: 8422 - protein, 24 aa, Homo sapiens
VQLVQSGPEVKKSGASVKISCKAS

SEQ ID NO: 8423 - protein, 26 aa, Homo sapiens
DIVMTQSPDSLAVSLGERATINCKSS

SEQ ID NO: 8424 - protein, 24 aa, Homo sapiens
VQLVQSGAEVKKPGESLRISCKAS

SEQ ID NO: 8425 - protein, 26 aa, Homo sapiens
DIQMTQSPSTLSASVGDRVTITCRAS

SEQ ID NO: 8426 - protein, 25 aa, Homo sapiens
QVQLQESGPGLVKPSETLSLTCSVS

SEQ ID NO: 8427 - protein, 26 aa, Homo sapiens
DIQMTQSPSTLSASVGDRVTITCRAS

SEQ ID NO: 8428 - protein, 24 aa, Homo sapiens
VQLVQSGAEVKKPGSSVKVSCRAS

SEQ ID NO: 8429 - protein, 26 aa, Homo sapiens [sequence omitted]

SEQ ID NO: 8430 - protein, 25 aa, Homo sapiens
EVQLVESGGGLVQPDGSLRLSCVAS

SEQ ID NO: 8431 - protein, 26 aa, Homo sapiens [sequence omitted]

SEQ ID NO: 8432 - protein, 25 aa, Homo sapiens
EVQLVESGGGLVKPGGSLRLSCAVS

SEQ ID NO: 8433 - protein, 24 aa, Homo sapiens
VMTQSPLSLPVTLGQPASISCRSS

SEQ ID NO: 8434 - protein, 23 aa, Homo sapiens
QLVQSGPEVKKPGTSVKVSCKAS

SEQ ID NO: 8435 - protein, 26 aa, Homo sapiens
DIVMTQSPLSLPVTPGEPASISCRSS

SEQ ID NO: 8436 - protein, 25 aa, Homo sapiens
EVQLVQSGAEVKKPGESLKISCKGS

SEQ ID NO: 8437 - protein, 26 aa, Homo sapiens
DIQLTQSPSFLSASVGDRVTITCRAS

SEQ ID NO: 8438 - protein, 25 aa, Homo sapiens [sequence omitted]

SEQ ID NO: 8439 - protein, 26 aa, Homo sapiens
EIVLTQSPATLVLSPGERATLSCRAS

SEQ ID NO: 8440 - protein, 24 aa, Homo sapiens
VQLVESGGGLAQPGGSLRLSCAAS

SEQ ID NO: 8441 - protein, 26 aa, Homo sapiens
DIQMTQSPSTLSASVGDVVTITCRAS

SEQ ID NO: 8442 - protein, 24 aa, Homo sapiens
VQLVQSGAEVKKPGASVRVSCTAS

SEQ ID NO: 8443 - protein, 26 aa, Homo sapiens
DIQMTQSPSSLSASIGDRISITCRAS

SEQ ID NO: 8444 - protein, 25 aa, Homo sapiens
EVQLVESGGGLVTPGGSLRLSCVGS

SEQ ID NO: 8445 - protein, 26 aa, Homo sapiens
EIVLTQSPGTLSLSPGERASLSCRAS

SEQ ID NO: 8446 - protein, 25 aa, Homo sapiens
QVQLVESGGGVVQPGRSLRLSCEAS

SEQ ID NO: 8447 - protein, 26 aa, Homo sapiens
DIQMTQSPSTLSAPVGDRVTITCRAS

SEQ ID NO: 8448 - protein, 23 aa, Homo sapiens
QLQESGPGLVNPSETVSLTCTVS

SEQ ID NO: 8449 - protein, 26 aa, Homo sapiens
EIVMTQSPATLSVSPGDRATLSCRAS

SEQ ID NO: 8450 - protein, 25 aa, Homo sapiens
EVQLVESGGGLEQPGGSLRLSCGVS

SEQ ID NO: 8451 - protein, 26 aa, Homo sapiens [sequence omitted]

SEQ ID NO: 8452 - protein, 23 aa, Homo sapiens
QLQESGPGLVKPSETLSLTCSVS

SEQ ID NO: 8453 - protein, 26 aa, Homo sapiens
EIVLTQSPATLVLSPGERATLSCRAS

SEQ ID NO: 8454 - protein, 25 aa, Homo sapiens
EVQLLESGGGLVQPGGSLRLSCAAS

SEQ ID NO: 8455 - protein, 26 aa, Homo sapiens
EIVLTQSPATLSLSPGERATLPCRAS

SEQ ID NO: 8456 - protein, 24 aa, Homo sapiens
VQLVESGGGLVKPGGSLRLSCAAS

SEQ ID NO: 8457 - protein, 26 aa, Homo sapiens [sequence omitted]

SEQ ID NO: 8458 - protein, 25 aa, Homo sapiens
QVQLQESGPGLVKPSETLSLTCTVS

SEQ ID NO: 8459 - protein, 26 aa, Homo sapiens [sequence omitted]

SEQ ID NO: 8460 - protein, 24 aa, Homo sapiens
VQLVQSGAEVKKPGASVKVSCKAS

SEQ ID NO: 8461 - protein, 26 aa, Homo sapiens [sequence omitted]

SEQ ID NO: 8462 - protein, 24 aa, Homo sapiens
VQLVESGGGLVQPGRSLRLSCAAS

SEQ ID NO: 8463 - protein, 26 aa, Homo sapiens
EIVMTQSPATLSVSPGERATLSCRAS

SEQ ID NO: 8464 - protein, 24 aa, Homo sapiens
VQLVQSGAEVKKPGSSVKVSCKAS

SEQ ID NO: 8465 - protein, 26 aa, Homo sapiens
DIVMTQSPLSLPVTPGEPASISCRSS

SEQ ID NO: 8466 - protein, 25 aa, Homo sapiens
QVQLVESGGGVVQPGRSLRLSCAAS

SEQ ID NO: 8467 - protein, 26 aa, Homo sapiens
EIVMTQSPATLSVSPGERATLSCRAS

SEQ ID NO: 8468 - protein, 25 aa, Homo sapiens
QVQLVESGGGVVQPGRSLRLSCAAS

SEQ ID NO: 8469 - protein, 26 aa, Homo sapiens [sequence omitted]

SEQ ID NO: 8470 - protein, 24 aa, Homo sapiens
VQLVESGGGLVKPGGSLRLSCAAS

SEQ ID NO: 8471 - protein, 26 aa, Homo sapiens
EIVMTQSPATLSVSPGERATLSCRAS

SEQ ID NO: 8472 - protein, 24 aa, Homo sapiens
VQLVQSGAEVKKPGSSVKVSCKAS

SEQ ID NO: 8473 - protein, 26 aa, Homo sapiens
DIVMTQSPLSLPVTPGEPASISCRSS

SEQ ID NO: 8474 - protein, 25 aa, Homo sapiens
EVQLVESGGGLVKPGGSLRLSCAAS

SEQ ID NO: 8475 - protein, 26 aa, Homo sapiens
DIVMTQSPLSLPVTPGEPASISCRSS

SEQ ID NO: 8476 - protein, 25 aa, Homo sapiens [sequence omitted]

SEQ ID NO: 8477 - protein, 26 aa, Homo sapiens
EIVMTQSPATLSVSPGERATLSCRAS

SEQ ID NO: 8478 - protein, 25 aa, Homo sapiens
QVQLQESGPGLVKPSQTLSLTCTVS

SEQ ID NO: 8479 - protein, 25 aa, Homo sapiens
QVQLQESGPGLVKPSQTLSLTCTVS

SEQ ID NO: 8480 - protein, 24 aa, Homo sapiens
VQLVQSGAEVKKPGASVKVSCKAS

SEQ ID NO: 8481 - protein, 26 aa, Homo sapiens [sequence omitted]

SEQ ID NO: 8482 - protein, 25 aa, Homo sapiens
EVQLVESGGDLVEPGGSLRLSCAAS

SEQ ID NO: 8483 - protein, 26 aa, Homo sapiens
DIQMTQSPSTLSASVGDRVTITCRAN

SEQ ID NO: 8484 - protein, 25 aa, Homo sapiens
QVQLVESGGGVVQPGRSLRLSCAAS

SEQ ID NO: 8485 - protein, 26 aa, Homo sapiens
EIVMTQSPATLSVSPGERAALSCRAS

SEQ ID NO: 8486 - protein, 26 aa, Homo sapiens
DIQMTQSPSSLSASVGDRVTITCQAS

SEQ ID NO: 8487 - protein, 26 aa, Homo sapiens [sequence omitted]

SEQ ID NO: 8488 - protein, 8 aa, Homo sapiens
GFTFSLYW

SEQ ID NO: 8489 - protein, 11 aa, Homo sapiens
QGLVSSDGTTY

SEQ ID NO: 8490 - protein, 8 aa, Homo sapiens
GFRFSDHY

SEQ ID NO: 8491 - protein, 12 aa, Homo sapiens
QNVLYNSNNKNY

SEQ ID NO: 8492 - protein, 10 aa, Homo sapiens
GVSISSGTYS

SEQ ID NO: 8493 - protein, 6 aa, Homo sapiens
QDISNS

SEQ ID NO: 8494 - protein, 8 aa, Homo sapiens
GFTFSNFW

SEQ ID NO: 8495 - protein, 11 aa, Homo sapiens
QSLVYSDGNTY

SEQ ID NO: 8496 - protein, 8 aa, Homo sapiens
GFTFSGYA

SEQ ID NO: 8497 - protein, 6 aa, Homo sapiens
QSVSRS

SEQ ID NO: 8498 - protein, 8 aa, Homo sapiens
GFTFSNFW

SEQ ID NO: 8499 - protein, 6 aa, Homo sapiens
QSVSGS

SEQ ID NO: 8500 - protein, 8 aa, Homo sapiens
GFTFSSHW

SEQ ID NO: 8501 - protein, 12 aa, Homo sapiens
RSLLSSSNNKNY

SEQ ID NO: 8502 - protein, 8 aa, Homo sapiens
GYTFSNYA

SEQ ID NO: 8503 - protein, 12 aa, Homo sapiens
QSVFYRSTNKNY

SEQ ID NO: 8504 - protein, 8 aa, Homo sapiens
GYTFTTYY

SEQ ID NO: 8505 - protein, 6 aa, Homo sapiens
QSISSW

SEQ ID NO: 8506 - protein, 8 aa, Homo sapiens
GDSMSTFY

SEQ ID NO: 8507 - protein, 6 aa, Homo sapiens
QDIGNW

SEQ ID NO: 8508 - protein, 8 aa, Homo sapiens
GGTFSSFA

SEQ ID NO: 8509 - protein, 7 aa, Homo sapiens
QSVSSSY

SEQ ID NO: 8510 - protein, 8 aa, Homo sapiens
GFTFNYYW

SEQ ID NO: 8511 - protein, 6 aa, Homo sapiens
QGINND

SEQ ID NO: 8512 - protein, 8 aa, Homo sapiens
GFTFSNAW

SEQ ID NO: 8513 - protein, 11 aa, Homo sapiens
QSLVYSDGNTY

SEQ ID NO: 8514 - protein, 8 aa, Homo sapiens
GSTFSSSA

SEQ ID NO: 8515 - protein, 11 aa, Homo sapiens
QSLLHNNGYNY

SEQ ID NO: 8516 - protein, 8 aa, Homo sapiens
GYSFTSYW

SEQ ID NO: 8517 - protein, 6 aa, Homo sapiens
QGISSY

SEQ ID NO: 8518 - protein, 8 aa, Homo sapiens
GFTFSRFW

SEQ ID NO: 8519 - protein, 6 aa, Homo sapiens
HFVNTF

SEQ ID NO: 8520 - protein, 8 aa, Homo sapiens
GFNFGYYN

SEQ ID NO: 8521 - protein, 6 aa, Homo sapiens
QSISSW

SEQ ID NO: 8522 - protein, 8 aa, Homo sapiens
GYRFTDYY

SEQ ID NO: 8523 - protein, 6 aa, Homo sapiens
QTIGSY

SEQ ID NO: 8524 - protein, 8 aa, Homo sapiens
GFNFRGYR

SEQ ID NO: 8525 - protein, 7 aa, Homo sapiens
QSINNRY

SEQ ID NO: 8526 - protein, 8 aa, Homo sapiens
GFTFSRFG

SEQ ID NO: 8527 - protein, 6 aa, Homo sapiens
QGINNW

SEQ ID NO: 8528 - protein, 10 aa, Homo sapiens
GGSISRSRYY

SEQ ID NO: 8529 - protein, 6 aa, Homo sapiens
QSVGST

SEQ ID NO: 8530 - protein, 8 aa, Homo sapiens
GFTFSDHS

SEQ ID NO: 8531 - protein, 6 aa, Homo sapiens
RDISDY

SEQ ID NO: 8532 - protein, 10 aa, Homo sapiens
GDSVGSGPYC

SEQ ID NO: 8533 - protein, 6 aa, Homo sapiens
HFVNTF

SEQ ID NO: 8534 - protein, 8 aa, Homo sapiens
GFSFSSYA

SEQ ID NO: 8535 - protein, 6 aa, Homo sapiens
QSVGSS

SEQ ID NO: 8536 - protein, 8 aa, Homo sapiens
GFTFDDYY

SEQ ID NO: 8537 - protein, 6 aa, Homo sapiens
QDISNY

SEQ ID NO: 8538 - protein, 8 aa, Homo sapiens
GGSISSYY

SEQ ID NO: 8539 - protein, 6 aa, Homo sapiens
QGISNY

SEQ ID NO: 8540 - protein, 8 aa, Homo sapiens
GYTFTGYY

SEQ ID NO: 8541 - protein, 6 aa, Homo sapiens
QSISSY

SEQ ID NO: 8542 - protein, 8 aa, Homo sapiens
GFTFDDYA

SEQ ID NO: 8543 - protein, 6 aa, Homo sapiens
QSVSSN

SEQ ID NO: 8544 - protein, 8 aa, Homo sapiens
GGTFSSYA

SEQ ID NO: 8545 - protein, 11 aa, Homo sapiens
QSLLHSNGYNY

SEQ ID NO: 8546 - protein, 8 aa, Homo sapiens
GFTFSSYA

SEQ ID NO: 8547 - protein, 6 aa, Homo sapiens
QSVSSN

SEQ ID NO: 8548 - protein, 8 aa, Homo sapiens
GFTFSSYG

SEQ ID NO: 8549 - protein, 6 aa, Homo sapiens
QSISSS

SEQ ID NO: 8550 - protein, 8 aa, Homo sapiens
GFTFSDYY

SEQ ID NO: 8551 - protein, 6 aa, Homo sapiens
QSVSSN

SEQ ID NO: 8552 - protein, 8 aa, Homo sapiens
GGTFSSYA

SEQ ID NO: 8553 - protein, 11 aa, Homo sapiens
QSLLHSNGYNY

SEQ ID NO: 8554 - protein, 8 aa, Homo sapiens
GFTFSNAW

SEQ ID NO: 8555 - protein, 11 aa, Homo sapiens
QSLLHSNGYNY

SEQ ID NO: 8556 - protein, 8 aa, Homo sapiens
GFTFSSYW

SEQ ID NO: 8557 - protein, 6 aa, Homo sapiens
QSVSSN

SEQ ID NO: 8558 - protein, 10 aa, Homo sapiens
GGSISSGGYY

SEQ ID NO: 8559 - protein, 10 aa, Homo sapiens
GGSISSGGYY

SEQ ID NO: 8560 - protein, 8 aa, Homo sapiens
GYTFTGYY

SEQ ID NO: 8561 - protein, 6 aa, Homo sapiens
QGISNY

SEQ ID NO: 8562 - protein, 8 aa, Homo sapiens
GFNFNIAW

SEQ ID NO: 8563 - protein, 6 aa, Homo sapiens
QTISTW

SEQ ID NO: 8564 - protein, 8 aa, Homo sapiens
GFTFSSYG

SEQ ID NO: 8565 - protein, 6 aa, Homo sapiens
QSVSRN

SEQ ID NO: 8566 - protein, 6 aa, Homo sapiens
QDISNY

SEQ ID NO: 8567 - protein, 7 aa, Homo sapiens
QSVSSSY

SEQ ID NO: 8568 - protein, 17 aa, Homo sapiens
MGWVRQAPGKGLEWVAT

SEQ ID NO: 8569 - protein, 17 aa, Homo sapiens
LSWYQQRPGQSPRRLFY

SEQ ID NO: 8570 - protein, 17 aa, Homo sapiens
MNWVRQAPGKGLEWIGR

SEQ ID NO: 8571 - protein, 17 aa, Homo sapiens
LAWYQQIPGQPPKLVIY

SEQ ID NO: 8572 - protein, 17 aa, Homo sapiens
WCWIRQPPGEGLQWIGY

SEQ ID NO: 8573 - protein, 17 aa, Homo sapiens
LNWYQQKPGKAPKLLIY

SEQ ID NO: 8574 - protein, 17 aa, Homo sapiens
MSWVRQAPGKGLEWVAN

SEQ ID NO: 8575 - protein, 17 aa, Homo sapiens
LNWFQQRPGQSPRRLIY

SEQ ID NO: 8576 - protein, 17 aa, Homo sapiens
MTWVRQAPGKGLEWVSG

SEQ ID NO: 8577 - protein, 17 aa, Homo sapiens
LAWYQQKPGQAPRLLIY

SEQ ID NO: 8578 - protein, 17 aa, Homo sapiens
MSWVRQAPGKGLEWVAN

SEQ ID NO: 8579 - protein, 17 aa, Homo sapiens
LAWYQQKPGQAPRLLIY

SEQ ID NO: 8580 - protein, 17 aa, Homo sapiens
MAWVRQAPGKGLEWVAN

SEQ ID NO: 8581 - protein, 17 aa, Homo sapiens
LAWYQQKSGQPPRLLMF

SEQ ID NO: 8582 - protein, 17 aa, Homo sapiens
VHWVRQAPGQRPEWMGW

SEQ ID NO: 8583 - protein, 17 aa, Homo sapiens
LAWYQQKPGQPPKLLIH

SEQ ID NO: 8584 - protein, 17 aa, Homo sapiens
ITWVRQMTGKGLEWMGR

SEQ ID NO: 8585 - protein, 17 aa, Homo sapiens
LAWYQQKPGKAPKLLIY

SEQ ID NO: 8586 - protein, 17 aa, Homo sapiens
WSWIRQPPGKGLEWIGF

SEQ ID NO: 8587 - protein, 17 aa, Homo sapiens
LAWYQQKPGKAPSLLIY

SEQ ID NO: 8588 - protein, 17 aa, Homo sapiens
VSWVRQAPGQGLEWMGG

SEQ ID NO: 8589 - protein, 17 aa, Homo sapiens
LAWYQQKPGQAPRLLIY

SEQ ID NO: 8590 - protein, 17 aa, Homo sapiens
MMWVRQAPGKGLEWVAN

SEQ ID NO: 8591 - protein, 17 aa, Homo sapiens
VAWFQQKPGKAPKSLIN

SEQ ID NO: 8592 - protein, 17 aa, Homo sapiens
MSWVRQAPGKGLEWVGR

SEQ ID NO: 8593 - protein, 17 aa, Homo sapiens
LNWFQQRPGQSPRRLIY

SEQ ID NO: 8594 - protein, 17 aa, Homo sapiens
VQWVRQARGQRPEWIGW

SEQ ID NO: 8595 - protein, 17 aa, Homo sapiens
LDWYLQKPGQSPHLLIY

SEQ ID NO: 8596 - protein, 17 aa, Homo sapiens
IAWVRQMPGKGLEWMGT

SEQ ID NO: 8597 - protein, 17 aa, Homo sapiens
LAWYQQKPGKAPKLLIY

SEQ ID NO: 8598 - protein, 17 aa, Homo sapiens
MSWVRQAPGKGLEWVAN

SEQ ID NO: 8599 - protein, 17 aa, Homo sapiens
LAWYQQKPGQSPRLLIS

SEQ ID NO: 8600 - protein, 17 aa, Homo sapiens
MHWIRQVPGKGLEWVSG

SEQ ID NO: 8601 - protein, 17 aa, Homo sapiens
LAWFQQRPGKAPKPLIY

SEQ ID NO: 8602 - protein, 17 aa, Homo sapiens
FHWVRQAPGQGLEWMGR

SEQ ID NO: 8603 - protein, 17 aa, Homo sapiens
LNWYQHKPGKAPKLLIS

SEQ ID NO: 8604 - protein, 17 aa, Homo sapiens
MNWVRQAPGKGLEWISY

SEQ ID NO: 8605 - protein, 17 aa, Homo sapiens
LAWYQQTPGQAPRLLIF

SEQ ID NO: 8606 - protein, 17 aa, Homo sapiens
MHWVRQAPGKGLEWLAV

SEQ ID NO: 8607 - protein, 17 aa, Homo sapiens
LAWYQQKPGKAPKLLIY

SEQ ID NO: 8608 - protein, 17 aa, Homo sapiens
WGWVRQPPGKGPEWIAS

SEQ ID NO: 8609 - protein, 17 aa, Homo sapiens
LAWYQQKPGQAPRLLIY

SEQ ID NO: 8610 - protein, 17 aa, Homo sapiens
MHWVRQAPGRGLEWLSF

SEQ ID NO: 8611 - protein, 17 aa, Homo sapiens
LAWFQQKPGEAPKPLIY

SEQ ID NO: 8612 - protein, 17 aa, Homo sapiens
WGWIRQSPGGGLQWIGS

SEQ ID NO: 8613 - protein, 17 aa, Homo sapiens
LAWYQQKPGQSPRLLIS

SEQ ID NO: 8614 - protein, 17 aa, Homo sapiens
MSWVRQAPGKGLEWVSA

SEQ ID NO: 8615 - protein, 17 aa, Homo sapiens
LVWYQQKPGQAPRLLIY

SEQ ID NO: 8616 - protein, 17 aa, Homo sapiens
MSWVRQAPGKGLEWVSY

SEQ ID NO: 8617 - protein, 17 aa, Homo sapiens
LNWYQQKPGKAPKLLIY

SEQ ID NO: 8618 - protein, 17 aa, Homo sapiens
WSWIRQPPGKGLEWIGY

SEQ ID NO: 8619 - protein, 17 aa, Homo sapiens
LAWFQQKPGKAPKSLIY

SEQ ID NO: 8620 - protein, 17 aa, Homo sapiens
MHWVRQAPGQGLEWMGW

SEQ ID NO: 8621 - protein, 17 aa, Homo sapiens
LNWYQQKPGKAPKLLIY

SEQ ID NO: 8622 - protein, 17 aa, Homo sapiens
MHWVRQAPGKGLEWVAG

SEQ ID NO: 8623 - protein, 17 aa, Homo sapiens
LAWYQQKPGQAPRLLIY

SEQ ID NO: 8624 - protein, 17 aa, Homo sapiens
ISWVRQAPGQGLEWMGG

SEQ ID NO: 8625 - protein, 17 aa, Homo sapiens
LDWYLQKPGQSPQLLIY

SEQ ID NO: 8626 - protein, 17 aa, Homo sapiens
MHWVRQAPGKGLEWVTI

SEQ ID NO: 8627 - protein, 17 aa, Homo sapiens
LAWYQQKPGQAPRLLIY

SEQ ID NO: 8628 - protein, 17 aa, Homo sapiens
MHWVRQAPGKGLEWVAV

SEQ ID NO: 8629 - protein, 17 aa, Homo sapiens
LNWYQQKPGKAPKLLIY

SEQ ID NO: 8630 - protein, 17 aa, Homo sapiens
MSWIRQAPGKGLEWVSY

SEQ ID NO: 8631 - protein, 17 aa, Homo sapiens
LAWYQQKPGQAPRLLIY

SEQ ID NO: 8632 - protein, 17 aa, Homo sapiens
ISWVRQAPGQGLEWMGG

SEQ ID NO: 8633 - protein, 17 aa, Homo sapiens
LDWYLQKPGQSPQLLIY

SEQ ID NO: 8634 - protein, 17 aa, Homo sapiens
MSWVRQAPGKGLEWVGR

SEQ ID NO: 8635 - protein, 17 aa, Homo sapiens
LDWYLQKPGQSPQLLIY

SEQ ID NO: 8636 - protein, 17 aa, Homo sapiens
MSWVRQAPGKGLEWVAY

SEQ ID NO: 8637 - protein, 17 aa, Homo sapiens
LAWYQQKPGQAPRLLIY

SEQ ID NO: 8638 - protein, 17 aa, Homo sapiens
WSWIRQHPGKGLEWIGY

SEQ ID NO: 8639 - protein, 17 aa, Homo sapiens
WSWIRQHPGKGLEWIGY

SEQ ID NO: 8640 - protein, 17 aa, Homo sapiens
MHWVRQAPGQGLEWMGW

SEQ ID NO: 8641 - protein, 17 aa, Homo sapiens
LAWYQQKPGKVPKLLIY

SEQ ID NO: 8642 - protein, 17 aa, Homo sapiens
MNWVRQAPGKGLEWVGR

SEQ ID NO: 8643 - protein, 17 aa, Homo sapiens
LAWYQQKPGKAPKLLIY

SEQ ID NO: 8644 - protein, 17 aa, Homo sapiens
IHWVRQAPGKGLEWVAV

SEQ ID NO: 8645 - protein, 17 aa, Homo sapiens
LAWYQQKPGQAPRLLIY

SEQ ID NO: 8646 - protein, 17 aa, Homo sapiens
LNWYQQKPGKAPKLLIY

SEQ ID NO: 8647 - protein, 17 aa, Homo sapiens
LAWYQQKPGQAPRLLIY

SEQ ID NO: 8648 - protein, 8 aa, Homo sapiens
MNQDGSDN

SEQ ID NO: 8649 - protein, 10 aa, Homo sapiens
IRNKANSFIT

SEQ ID NO: 8650 - protein, 7 aa, Homo sapiens
MSHSGRT

SEQ ID NO: 8651 - protein, 8 aa, Homo sapiens
IRQDGGER

SEQ ID NO: 8652 - protein, 8 aa, Homo sapiens
LSRDGADT

SEQ ID NO: 8653 - protein, 8 aa, Homo sapiens
IKQDGSEK

SEQ ID NO: 8654 - protein, 8 aa, Homo sapiens
IKKDGSET

SEQ ID NO: 8655 - protein, 8 aa, Homo sapiens
SNAGSGAT

SEQ ID NO: 8656 - protein, 8 aa, Homo sapiens
IDPRDSYS

SEQ ID NO: 8657 - protein, 7 aa, Homo sapiens
MHHSGSA

SEQ ID NO: 8658 - protein, 8 aa, Homo sapiens
IIGMFGTT

SEQ ID NO: 8659 - protein, 8 aa, Homo sapiens
INRDGSEK

SEQ ID NO: 8660 - protein, 10 aa, Homo sapiens
FKSKSGGGTT

SEQ ID NO: 8661 - protein, 8 aa, Homo sapiens
IVVGSGNT

SEQ ID NO: 8662 - protein, 8 aa, Homo sapiens
IHPGDSDT

SEQ ID NO: 8663 - protein, 8 aa, Homo sapiens
INQDGSEK

SEQ ID NO: 8664 - protein, 8 aa, Homo sapiens
ISWNSVHI

SEQ ID NO: 8665 - protein, 8 aa, Homo sapiens
INPNTGET

SEQ ID NO: 8666 - protein, 8 aa, Homo sapiens
ITTDSTTK

SEQ ID NO: 8667 - protein, 8 aa, Homo sapiens
ISYDGSHT

SEQ ID NO: 8668 - protein, 7 aa, Homo sapiens
TKTSGHT

SEQ ID NO: 8669 - protein, 8 aa, Homo sapiens
ISTSGSIR

SEQ ID NO: 8670 - protein, 7 aa, Homo sapiens
ICNRGES

SEQ ID NO: 8671 - protein, 8 aa, Homo sapiens
ISGSGDST

SEQ ID NO: 8672 - protein, 8 aa, Homo sapiens
ISSSGTII

SEQ ID NO: 8673 - protein, 7 aa, Homo sapiens
IYYSGST

SEQ ID NO: 8674 - protein, 8 aa, Homo sapiens
INPNSGGT

SEQ ID NO: 8675 - protein, 8 aa, Homo sapiens
ISWNSGSI

SEQ ID NO: 8676 - protein, 8 aa, Homo sapiens
IIPIFGTA

SEQ ID NO: 8677 - protein, 8 aa, Homo sapiens
ISYDGSNK

SEQ ID NO: 8678 - protein, 8 aa, Homo sapiens
ISYDGSNK

SEQ ID NO: 8679 - protein, 8 aa, Homo sapiens
ISSSGSTI

SEQ ID NO: 8680 - protein, 8 aa, Homo sapiens
IIPMFGAA

SEQ ID NO: 8681 - protein, 10 aa, Homo sapiens
IKSKTDGGTT

SEQ ID NO: 8682 - protein, 8 aa, Homo sapiens
IKQDGSEK

SEQ ID NO: 8683 - protein, 7 aa, Homo sapiens
IYYSGST

SEQ ID NO: 8684 - protein, 7 aa, Homo sapiens
IYYSGST

SEQ ID NO: 8685 - protein, 8 aa, Homo sapiens
INPNSGGT

SEQ ID NO: 8686 - protein, 10 aa, Homo sapiens
IKSNTDGGTT

SEQ ID NO: 8687 - protein, 8 aa, Homo sapiens
ISYDGSNK

SEQ ID NO: 8688 - protein, 38 aa, Homo sapiens; identical to SEQ ID NO: 3618

SEQ ID NO: 8689 - protein, 36 aa, Homo sapiens
ERDSGVPDRFSGSGSGTDFTLKISRVEAEDVGVYYC

SEQ ID NO: 8690 - protein, 38 aa, Homo sapiens
EYAASVKDRFSISRDDSKNSLYLQMHSLKSEDTAMYFC

SEQ ID NO: 8691 - protein, 36 aa, Homo sapiens
TRESGVPDRFSGNGSGTDFTLTISSLQAEDVAVYYC

SEQ ID NO: 8692 - protein, 38 aa, Homo sapiens
YNNPSLKSRVIMSVDRSKNQLSLMLTSVTAADTAVYFC

SEQ ID NO: 8693 - protein, 36 aa, Homo sapiens
NLETGVPSRFSGSGSGTHFTFTISSLQPEDIGTYYC

SEQ ID NO: 8694 - protein, 38 aa, Homo sapiens
YYVGSARGRFTIARDNANNSLYLQMNSLRVEDTAVYYC

SEQ ID NO: 8695 - protein, 36 aa, Homo sapiens
KRDSGVPDRFSGSGSGSDFTLKISRVEAEDVGVYYC

SEQ ID NO: 8696 - protein, 38 aa, Homo sapiens
SYADSVKGRLIISRDNSKNTLYLQIHNLKAEDTAVYYC

SEQ ID NO: 8697 - protein, 36 aa, Homo sapiens
NRVTGIPARFSGSGSGTDFTLTISSLEPEDFAFYYC

SEQ ID NO: 8698 - protein, 38 aa, Homo sapiens
YYVDSVRGRFTFSRDNANNSLLLQMNSLRADDTAVYYC

SEQ ID NO: 8699 - protein, 36 aa, Homo sapiens; identical to SEQ ID NO: 579

SEQ ID NO: 8700 - protein, 38 aa, Homo sapiens
NYVDSVKGRFTISRDNAKNALYLQMNSLRVEDTAVYYC

SEQ ID NO: 8701 - protein, 36 aa, Homo sapiens
ARESGVPDRFSGSGSGTDFTLTISSLQAEDVAVYYC

SEQ ID NO: 8702 - protein, 38 aa, Homo sapiens
KYSQNFQGRLTIVRDTSANTVFMELSSLTSEDTAVYYC

SEQ ID NO: 8703 - protein, 36 aa, Homo sapiens
TRESGVPDRFSGSGSGTDFTLTISSLQAEDVAVYYC

SEQ ID NO: 8704 - protein, 38 aa, Homo sapiens
NYNPSFEGHVTMSVDKSITTAYLQWSGLKASDTAIYYC

SEQ ID NO: 8705 - protein, 36 aa, Homo sapiens
SLESGVPSRFSGSGSGTEFTLTISSLQPDDFATYYC

SEQ ID NO: 8706 - protein, 38 aa, Homo sapiens
GYNPSLKSRVAFSVDTSKNQFSLRLTSVTAADTAIYYC

SEQ ID NO: 8707 - protein, 36 aa, Homo sapiens
TLQSGVPSRFSGRRSGTEFTLTISSLQPDDLATYYC

SEQ ID NO: 8708 - protein, 38 aa, Homo sapiens; identical to SEQ ID NO: 28

SEQ ID NO: 8709 - protein, 36 aa, Homo sapiens [sequence omitted]

SEQ ID NO: 8710 - protein, 38 aa, Homo sapiens
NYVDSVKGRFSISRDSVRNSLYLQMNSLRAEDTAVYYC

SEQ ID NO: 8711 - protein, 36 aa, Homo sapiens
SLQSGVPSKFSGSGSGTDFTLTISNLQPEDFATYYC

SEQ ID NO: 8712 - protein, 38 aa, Homo sapiens
DYAAPVKGRFTISRDDSKNTLHLQMNSLKTEDTAVYYC

SEQ ID NO: 8713 - protein, 36 aa, Homo sapiens
NRDSGVPDRFSGSGSGTDFTLKISRVEAEDVGVYYC

SEQ ID NO: 8714 - protein, 38 aa, Homo sapiens
NYAQNFQDRVTITRDMSTSTAYMELSSLRSEDTAVYYC

SEQ ID NO: 8715 - protein, 36 aa, Homo sapiens
NRASGVPDRFSGSGSGTDFTLEISRVEAEDVGVYYC

SEQ ID NO: 8716 - protein, 38 aa, Homo sapiens
TYGPSFQGQVAISADRSISTAFLEWGSLKASDTAMYYC

SEQ ID NO: 8717 - protein, 36 aa, Homo sapiens
TLQSGVPARFSGSGSGTEFTLTISRLQPEDFATFYC

SEQ ID NO: 8718 - protein, 38 aa, Homo sapiens
NYVDSVEGRFTISRDNAKNSLYLQMNSLRAEDTAVYHC

SEQ ID NO: 8719 - protein, 36 aa, Homo sapiens
IRATGIPARFSGSGSGTDFTLTISSLEPEDCAVYYC

SEQ ID NO: 8720 - protein, 38 aa, Homo sapiens
AYADSVKGRFTISRDNAKDSLYLQMNSLRPDDTALYFC

SEQ ID NO: 8721 - protein, 36 aa, Homo sapiens
RLQSGVPSRFSGSGSGTEFTLTISSLQPDDFATYYC

SEQ ID NO: 8722 - protein, 38 aa, Homo sapiens
NYAQRFQGSVTMTRDTSINTGYMELRRLSLDDTAVYYC

SEQ ID NO: 8723 - protein, 36 aa, Homo sapiens
TLQSGVPSRFSGSGSGTGFTLTISSLQPDDSATYYC

SEQ ID NO: 8724 - protein, 38 aa, Homo sapiens
TYADSVKGRFTISRDNAGSSLHLQMNDLRDEDTAVYFC

SEQ ID NO: 8725 - protein, 36 aa, Homo sapiens
NRATGIPNRFSGSGSGTDFTLTISRLEPEDFAVYYC

SEQ ID NO: 8726 - protein, 38 aa, Homo sapiens
YYGDSVRGRFTISRDNSKNTLYLQVNSLRPEDTAVYYC

SEQ ID NO: 8727 - protein, 36 aa, Homo sapiens
TLESGVPSRFSGSGSGTEFTLTISSLQPEDFATYYC

SEQ ID NO: 8728 - protein, 38 aa, Homo sapiens
WYNPSLESRVTISMDTSKNQISLNLRSVTAADTAIYYC

SEQ ID NO: 8729 - protein, 36 aa, Homo sapiens
SRATGVPARFSGSGSGREFTLTINSLQSEDFAVYYC

SEQ ID NO: 8730 - protein, 38 aa, Homo sapiens
YYADSVKGRFTVSRDNAKNSLYLQMDSLRDEDTALYYC

SEQ ID NO: 8731 - protein, 36 aa, Homo sapiens
SLQSGVPSRFSGSGSGTDFTFTISSLQPEDFGTYFC

SEQ ID NO: 8732 - protein, 38 aa, Homo sapiens
NYTPTLKSRLAISADTSRNQVSLRLTSVTDADTAVYYC

SEQ ID NO: 8733 - protein, 36 aa, Homo sapiens; identical to SEQ ID NO: 8719

SEQ ID NO: 8734 - protein, 38 aa, Homo sapiens
YDADYVKGRFTISRDNSKNTLYLEMNSLTAEDTAVYYC

SEQ ID NO: 8735 - protein, 36 aa, Homo sapiens [sequence omitted]

SEQ ID NO: 8736 - protein, 38 aa, Homo sapiens
FYADSVKGRFIVSRDNAKNSLFLEMNSLRDEDTGRYYC

SEQ ID NO: 8737 - protein, 36 aa, Homo sapiens
NLQTGVPSRFSGSGFGTDFTFTISSLQPEDFATYYC

SEQ ID NO: 8738 - protein, 38 aa, Homo sapiens; identical to SEQ ID NO: 3624

SEQ ID NO: 8739 - protein, 36 aa, Homo sapiens
SLQSGVPSKFSGSGSGTDFTLTISSLQPEDFATYYC

SEQ ID NO: 8740 - protein, 38 aa, Homo sapiens; identical to SEQ ID NO: 3747

SEQ ID NO: 8741 - protein, 36 aa, Homo sapiens; identical to SEQ ID NO: 602

SEQ ID NO: 8742 - protein, 38 aa, Homo sapiens
GYADSVKGRFTISRDNAKNSLFLQMNSLRAEDTALYSC

SEQ ID NO: 8743 - protein, 36 aa, Homo sapiens; identical to SEQ ID NO: 584

SEQ ID NO: 8744 - protein, 38 aa, Homo sapiens; identical to SEQ ID NO: 609

SEQ ID NO: 8745 - protein, 36 aa, Homo sapiens; identical to SEQ ID NO: 618

SEQ ID NO: 8746 - protein, 38 aa, Homo sapiens; identical to SEQ ID NO: 631

SEQ ID NO: 8747 - protein, 36 aa, Homo sapiens; identical to SEQ ID NO: 584

SEQ ID NO: 8748 - protein, 38 aa, Homo sapiens; identical to SEQ ID NO: 631

SEQ ID NO: 8749 - protein, 36 aa, Homo sapiens; identical to SEQ ID NO: 602

SEQ ID NO: 8750 - protein, 38 aa, Homo sapiens; identical to SEQ ID NO: 632

SEQ ID NO: 8751 - protein, 36 aa, Homo sapiens; identical to SEQ ID NO: 584

SEQ ID NO: 8752 - protein, 38 aa, Homo sapiens; identical to SEQ ID NO: 609

SEQ ID NO: 8753 - protein, 36 aa, Homo sapiens; identical to SEQ ID NO: 618

SEQ ID NO: 8754 - protein, 38 aa, Homo sapiens
DYAAPVKGRFTISRDDSKNTLYLQMNSLKTEDTAVYYC

SEQ ID NO: 8755 - protein, 36 aa, Homo sapiens; identical to SEQ ID NO: 618

SEQ ID NO: 8756 - protein, 38 aa, Homo sapiens; identical to SEQ ID NO: 3618

SEQ ID NO: 8757 - protein, 36 aa, Homo sapiens; identical to SEQ ID NO: 584

SEQ ID NO: 8758 - protein, 38 aa, Homo sapiens; identical to SEQ ID NO: 593

SEQ ID NO: 8759 - protein, 38 aa, Homo sapiens; identical to SEQ ID NO: 593

SEQ ID NO: 8760 - protein, 38 aa, Homo sapiens; identical to SEQ ID NO: 3747

SEQ ID NO: 8761 - protein, 36 aa, Homo sapiens
TLQSGVPSRFSGSGSGTDFTLTISSLQPEDVATYYC

SEQ ID NO: 8762 - protein, 38 aa, Homo sapiens
DYAAPVKGRFTISRDDSKYTLFLQMNRLQTEDTAVYYC

SEQ ID NO: 8763 - protein, 36 aa, Homo sapiens
NFASGVPSRFSGSGSGTEFTLTISSLQPDDFASYYC

SEQ ID NO: 8764 - protein, 38 aa, Homo sapiens
YYADSVKGRFTISRDNSKNTLYLQMNSLRAEDTAMYYC

SEQ ID NO: 8765 - protein, 36 aa, Homo sapiens; identical to SEQ ID NO: 584

SEQ ID NO: 8766 - protein, 36 aa, Homo sapiens
NLETGVPSRFSGSGSGTDFTFTISSLQPEDIATYYC

SEQ ID NO: 8767 - protein, 36 aa, Homo sapiens [sequence omitted]

SEQ ID NO: 8768 - protein, 10 aa, Homo sapiens
ARDFDRGAEH

SEQ ID NO: 8769 - protein, 9 aa, Homo sapiens
LQGTHWPRT

SEQ ID NO: 8770 - protein, 18 aa, Homo sapiens
TRDFLEWSRPYYYHFMDV

SEQ ID NO: 8771 - protein, 9 aa, Homo sapiens
QQYYTTPPT

SEQ ID NO: 8772 - protein, 10 aa, Homo sapiens
ARAARGRLNI

SEQ ID NO: 8773 - protein, 11 aa, Homo sapiens
QQYDNLPPIFT

SEQ ID NO: 8774 - protein, 11 aa, Homo sapiens
TRDSGITRFDY

SEQ ID NO: 8775 - protein, 9 aa, Homo sapiens
MQGTHWPPA

SEQ ID NO: 8776 - protein, 22 aa, Homo sapiens
AKSLFSGTVDDNNGFYFDAFDI

SEQ ID NO: 8777 - protein, 11 aa, Homo sapiens
QQRSNWPPTLT

SEQ ID NO: 8778 - protein, 10 aa, Homo sapiens
ARTSSAYFDY

SEQ ID NO: 8779 - protein, 9 aa, Homo sapiens
QQRSNWPQT

SEQ ID NO: 8780 - protein, 10 aa, Homo sapiens
AKDAYSVPDY

SEQ ID NO: 8781 - protein, 9 aa, Homo sapiens
QHYYTEPET

SEQ ID NO: 8782 - protein, 15 aa, Homo sapiens
ARPVRNGIAPSAIEY

SEQ ID NO: 8783 - protein, 8 aa, Homo sapiens
QQYYNTIT

SEQ ID NO: 8784 - protein, 13 aa, Homo sapiens
ARAAGGTLGWFDP

SEQ ID NO: 8785 - protein, 9 aa, Homo sapiens
QQYNSYPRT

SEQ ID NO: 8786 - protein, 19 aa, Homo sapiens
ATSNLDYMIGWAHRGAFNI

SEQ ID NO: 8787 - protein, 9 aa, Homo sapiens
QQYNSYLFT

SEQ ID NO: 8788 - protein, 18 aa, Homo sapiens
ARPGDYRTIRYYHFFMDV

SEQ ID NO: 8789 - protein, 10 aa, Homo sapiens
QQYGSSPPAT

SEQ ID NO: 8790 - protein, 16 aa, Homo sapiens
ATDRYEGKWSVDRFNY

SEQ ID NO: 8791 - protein, 9 aa, Homo sapiens
QQYNSYPLT

SEQ ID NO: 8792 - protein, 8 aa, Homo sapiens
IADWHPEY

SEQ ID NO: 8793 - protein, 10 aa, Homo sapiens
MQTALWPPNT

SEQ ID NO: 8794 - protein, 15 aa, Homo sapiens
AAYFGGSASNYGLDV

SEQ ID NO: 8795 - protein, 9 aa, Homo sapiens
MQASQTPQT

SEQ ID NO: 8796 - protein, 15 aa, Homo sapiens
ARPKYSSSSYSGFDV

SEQ ID NO: 8797 - protein, 9 aa, Homo sapiens
QQLHSSPLT

SEQ ID NO: 8798 - protein, 9 aa, Homo sapiens
APETYYFDH

SEQ ID NO: 8799 - protein, 8 aa, Homo sapiens
QQRSQLVT

SEQ ID NO: 8800 - protein, 21 aa, Homo sapiens
AKDINTAQYCNIVNCYGEFDY

SEQ ID NO: 8801 - protein, 8 aa, Homo sapiens
QQYDTYPT

SEQ ID NO: 8802 - protein, 25 aa, Homo sapiens
ARGGYQDSTGYHYDDDGPRYYGLDD

SEQ ID NO: 8803 - protein, 9 aa, Homo sapiens
QQSYTPLIT

SEQ ID NO: 8804 - protein, 24 aa, Homo sapiens
ARDPTPVAGRVRRAISDYQYAMDV

SEQ ID NO: 8805 - protein, 10 aa, Homo sapiens
QHYGASPLYN

SEQ ID NO: 8806 - protein, 15 aa, Homo sapiens
AKDADTTGYYDPFDY

SEQ ID NO: 8807 - protein, 8 aa, Homo sapiens
QQYHEYHS

SEQ ID NO: 8808 - protein, 20 aa, Homo sapiens
ATRGVEDCSGIDCSLYYMEV

SEQ ID NO: 8809 - protein, 9 aa, Homo sapiens
QKYDNWPVT

SEQ ID NO: 8810 - protein, 14 aa, Homo sapiens
ARVAGRGYRDYTDF

SEQ ID NO: 8811 - protein, 9 aa, Homo sapiens
QQYNSYPRT

SEQ ID NO: 8812 - protein, 12 aa, Homo sapiens
ARSSRSFGDYGD

SEQ ID NO: 8813 - protein, 8 aa, Homo sapiens
QQRSQLVT

SEQ ID NO: 8814 - protein, 14 aa, Homo sapiens
AKDSVFNFGSRDDH

SEQ ID NO: 8815 - protein, 9 aa, Homo sapiens
HQRYNWPRT

SEQ ID NO: 8816 - protein, 11 aa, Homo sapiens
ARSTVIMPPDV

SEQ ID NO: 8817 - protein, 9 aa, Homo sapiens
QQNHNVLFN

SEQ ID NO: 8818 - protein, 9 aa, Homo sapiens
ARGGSGSYG

SEQ ID NO: 8819 - protein, 9 aa, Homo sapiens
QQYNSYPPT

SEQ ID NO: 8820 - protein, 17 aa, Homo sapiens
ARANSDRYYYDSSGYSY

SEQ ID NO: 8821 - protein, 9 aa, Homo sapiens
QQSYSTPIT

SEQ ID NO: 8822 - protein, 16 aa, Homo sapiens
AKAGIAAAGTNYAFDI

SEQ ID NO: 8823 - protein, 11 aa, Homo sapiens
QQYNNWPPPVT

SEQ ID NO: 8824 - protein, 19 aa, Homo sapiens
ARVVDIAARPEGYYYYMDV

SEQ ID NO: 8825 - protein, 8 aa, Homo sapiens
MQALQTWT

SEQ ID NO: 8826 - protein, 17 aa, Homo sapiens
ARGLGLEWRLSPGYFDY

SEQ ID NO: 8827 - protein, 9 aa, Homo sapiens
QQYNNWPGT

SEQ ID NO: 8828 - protein, 13 aa, Homo sapiens
AKDSEGYEYYFDY

SEQ ID NO: 8829 - protein, 9 aa, Homo sapiens
QQSYSTPLT

SEQ ID NO: 8830 - protein, 15 aa, Homo sapiens
ARDGDSSGWYARFDY

SEQ ID NO: 8831 - protein, 10 aa, Homo sapiens [sequence omitted]

SEQ ID NO: 8832 - protein, 17 aa, Homo sapiens
ARARTVGFGESAYYMDV

SEQ ID NO: 8833 - protein, 8 aa, Homo sapiens
MQALHPCS

SEQ ID NO: 8834 - protein, 15 aa, Homo sapiens
TTDRWGSSYYYYMDV

SEQ ID NO: 8835 - protein, 9 aa, Homo sapiens
MQALQTTWT

SEQ ID NO: 8836 - protein, 15 aa, Homo sapiens
ARDADSSGWYAHFDY

SEQ ID NO: 8837 - protein, 10 aa, Homo sapiens [sequence omitted]

SEQ ID NO: 8838 - protein, 16 aa, Homo sapiens
ARNPDVYDFGSNWFDP

SEQ ID NO: 8839 - protein, 18 aa, Homo sapiens
ARAPDDFWSGYWGYYFDY

SEQ ID NO: 8840 - protein, 16 aa, Homo sapiens
ARGLHSSSDYYYGMDV

SEQ ID NO: 8841 - protein, 9 aa, Homo sapiens
QKYNSAPFT

SEQ ID NO: 8842 - protein, 10 aa, Homo sapiens
TTDPYPTFGY

SEQ ID NO: 8843 - protein, 9 aa, Homo sapiens
QQYNSYWWT

SEQ ID NO: 8844 - protein, 17 aa, Homo sapiens
AKDYTPYALEWLPLFDY

SEQ ID NO: 8845 - protein, 10 aa, Homo sapiens
QQYNKWPPLT

SEQ ID NO: 8846 - protein, 9 aa, Homo sapiens
QQYDNLPLT

SEQ ID NO: 8847 - protein, 8 aa, Homo sapiens
QQYGSSGT

SEQ ID NO: 8848 - protein, 12 aa, Homo sapiens
CARDFDRGAEHW

SEQ ID NO: 8849 - protein, 11 aa, Homo sapiens [sequence omitted]

SEQ ID NO: 8850 - protein, 20 aa, Homo sapiens
CTRDFLEWSRPYYYHFMDVW

SEQ ID NO: 8851 - protein, 11 aa, Homo sapiens [sequence omitted]

SEQ ID NO: 8852 - protein, 12 aa, Homo sapiens
CARAARGRLNIW

SEQ ID NO: 8853 - protein, 13 aa, Homo sapiens [sequence omitted]

SEQ ID NO: 8854 - protein, 13 aa, Homo sapiens
CTRDSGITRFDYW

SEQ ID NO: 8855 - protein, 11 aa, Homo sapiens [sequence omitted]

SEQ ID NO: 8856 - protein, 24 aa, Homo sapiens
CAKSLFSGTVDDNNGFYFDAFDIW

SEQ ID NO: 8857 - protein, 13 aa, Homo sapiens [sequence omitted]

SEQ ID NO: 8858 - protein, 12 aa, Homo sapiens
CARTSSAYFDYW

SEQ ID NO: 8859 - protein, 11 aa, Homo sapiens [sequence omitted]

SEQ ID NO: 8860 - protein, 12 aa, Homo sapiens
CAKDAYSVPDYW

SEQ ID NO: 8861 - protein, 11 aa, Homo sapiens
CQHYYTEPETF

SEQ ID NO: 8862 - protein, 17 aa, Homo sapiens
CARPVRNGIAPSAIEYW

SEQ ID NO: 8863 - protein, 10 aa, Homo sapiens [sequence omitted]

SEQ ID NO: 8864 - protein, 15 aa, Homo sapiens
CARAAGGTLGWFDPW

SEQ ID NO: 8865 - protein, 11 aa, Homo sapiens [sequence omitted]

SEQ ID NO: 8866 - protein, 21 aa, Homo sapiens
CATSNLDYMIGWAHRGAFNIW

SEQ ID NO: 8867 - protein, 11 aa, Homo sapiens [sequence omitted]

SEQ ID NO: 8868 - protein, 20 aa, Homo sapiens
CARPGDYRTIRYYHFFMDVW

SEQ ID NO: 8869 - protein, 12 aa, Homo sapiens [sequence omitted]

SEQ ID NO: 8870 - protein, 18 aa, Homo sapiens
CATDRYEGKWSVDRFNYW

SEQ ID NO: 8871 - protein, 11 aa, Homo sapiens [sequence omitted]

SEQ ID NO: 8872 - protein, 10 aa, Homo sapiens
CIADWHPEYW

SEQ ID NO: 8873 - protein, 12 aa, Homo sapiens
CMQTALWPPNTF

SEQ ID NO: 8874 - protein, 17 aa, Homo sapiens
CAAYFGGSASNYGLDVW

SEQ ID NO: 8875 - protein, 11 aa, Homo sapiens
CMQASQTPQTF

SEQ ID NO: 8876 - protein, 17 aa, Homo sapiens
CARPKYSSSSYSGFDVW

SEQ ID NO: 8877 - protein, 11 aa, Homo sapiens [sequence omitted]

SEQ ID NO: 8878 - protein, 11 aa, Homo sapiens
CAPETYYFDHW

SEQ ID NO: 8879 - protein, 10 aa, Homo sapiens
CQQRSQLVTF

SEQ ID NO: 8880 - protein, 23 aa, Homo sapiens
CAKDINTAQYCNIVNCYGEFDYW

SEQ ID NO: 8881 - protein, 10 aa, Homo sapiens [sequence omitted]

SEQ ID NO: 8882 - protein, 27 aa, Homo sapiens
CARGGYQDSTGYHYDDDGPRYYGLDDW

SEQ ID NO: 8883 - protein, 11 aa, Homo sapiens
CQQSYTPLITF

SEQ ID NO: 8884 - protein, 26 aa, Homo sapiens
CARDPTPVAGRVRRAISDYQYAMDVW

SEQ ID NO: 8885 - protein, 12 aa, Homo sapiens
CQHYGASPLYNF

SEQ ID NO: 8886 - protein, 17 aa, Homo sapiens
CAKDADTTGYYDPFDYW

SEQ ID NO: 8887 - protein, 10 aa, Homo sapiens
CQQYHEYHSF

SEQ ID NO: 8888 - protein, 22 aa, Homo sapiens
CATRGVEDCSGIDCSLYYMEVW

SEQ ID NO: 8889 - protein, 11 aa, Homo sapiens
CQKYDNWPVTF

SEQ ID NO: 8890 - protein, 16 aa, Homo sapiens
CARVAGRGYRDYTDFW

SEQ ID NO: 8891 - protein, 11 aa, Homo sapiens [sequence omitted]

SEQ ID NO: 8892 - protein, 14 aa, Homo sapiens
CARSSRSFGDYGDW

SEQ ID NO: 8893 - protein, 10 aa, Homo sapiens
CQQRSQLVTF

SEQ ID NO: 8894 - protein, 16 aa, Homo sapiens
CAKDSVFNFGSRDDHW

SEQ ID NO: 8895 - protein, 11 aa, Homo sapiens [sequence omitted]

SEQ ID NO: 8896 - protein, 13 aa, Homo sapiens
CARSTVIMPPDVW

SEQ ID NO: 8897 - protein, 11 aa, Homo sapiens
CQQNHNVLFNF

SEQ ID NO: 8898 - protein, 11 aa, Homo sapiens
CARGGSGSYGW

SEQ ID NO: 8899 - protein, 11 aa, Homo sapiens [sequence omitted]

SEQ ID NO: 8900 - protein, 19 aa, Homo sapiens
CARANSDRYYYDSSGYSYW

SEQ ID NO: 8901 - protein, 11 aa, Homo sapiens [sequence omitted]

SEQ ID NO: 8902 - protein, 18 aa, Homo sapiens
CAKAGIAAAGTNYAFDIW

SEQ ID NO: 8903 - protein, 13 aa, Homo sapiens [sequence omitted]

SEQ ID NO: 8904 - protein, 21 aa, Homo sapiens
CARVVDIAARPEGYYYYMDVW

SEQ ID NO: 8905 - protein, 10 aa, Homo sapiens [sequence omitted]

SEQ ID NO: 8906 - protein, 19 aa, Homo sapiens
CARGLGLEWRLSPGYFDYW

SEQ ID NO: 8907 - protein, 11 aa, Homo sapiens [sequence omitted]

SEQ ID NO: 8908 - protein, 15 aa, Homo sapiens
CAKDSEGYEYYFDYW

SEQ ID NO: 8909 - protein, 11 aa, Homo sapiens [sequence omitted]

SEQ ID NO: 8910 - protein, 17 aa, Homo sapiens
CARDGDSSGWYARFDYW

SEQ ID NO: 8911 - protein, 12 aa, Homo sapiens [sequence omitted]

SEQ ID NO: 8912 - protein, 19 aa, Homo sapiens
CARARTVGFGESAYYMDVW

SEQ ID NO: 8913 - protein, 10 aa, Homo sapiens
CMQALHPCSF

SEQ ID NO: 8914 - protein, 17 aa, Homo sapiens
CTTDRWGSSYYYYMDVW

SEQ ID NO: 8915 - protein, 11 aa, Homo sapiens [sequence omitted]

SEQ ID NO: 8916 - protein, 17 aa, Homo sapiens
CARDADSSGWYAHFDYW

SEQ ID NO: 8917 - protein, 12 aa, Homo sapiens [sequence omitted]

SEQ ID NO: 8918 - protein, 18 aa, Homo sapiens
CARNPDVYDFGSNWFDPW

SEQ ID NO: 8919 - protein, 20 aa, Homo sapiens
CARAPDDFWSGYWGYYFDYW

SEQ ID NO: 8920 - protein, 18 aa, Homo sapiens
CARGLHSSSDYYYGMDVW

SEQ ID NO: 8921 - protein, 11 aa, Homo sapiens [sequence omitted]

SEQ ID NO: 8922 - protein, 12 aa, Homo sapiens
CTTDPYPTFGYW

SEQ ID NO: 8923 - protein, 11 aa, Homo sapiens [sequence omitted]

SEQ ID NO: 8924 - protein, 19 aa, Homo sapiens
CAKDYTPYALEWLPLFDYW

SEQ ID NO: 8925 - protein, 12 aa, Homo sapiens [sequence omitted]

SEQ ID NO: 8926 - protein, 11 aa, Homo sapiens [sequence omitted]

SEQ ID NO: 8927 - protein, 10 aa, Homo sapiens [sequence omitted]

SEQ ID NO: 8928 - protein, 13 aa, Homo sapiens
EHWGHGTLVTVSS

SEQ ID NO: 8929 - protein, 11 aa, Homo sapiens
TFGQGTKVEIK

SEQ ID NO: 8930 - protein, 19 aa, Homo sapiens
YYYHFMDVWGKGTTVTVSS

SEQ ID NO: 8931 - protein, 11 aa, Homo sapiens
TFGQGTKVEIK

SEQ ID NO: 8932 - protein, 14 aa, Homo sapiens
LNIWGLGTMVTVSS

SEQ ID NO: 8933 - protein, 12 aa, Homo sapiens
FTFGPGTKVDIK

SEQ ID NO: 8934 - protein, 14 aa, Homo sapiens
FDYWGQGALVTVSS

SEQ ID NO: 8935 - protein, 10 aa, Homo sapiens
FGQGTRLEIK

SEQ ID NO: 8936 - protein, 16 aa, Homo sapiens
DAFDIWGQGTMVTVSS

SEQ ID NO: 8937 - protein, 12 aa, Homo sapiens
LTFGGGTKVEIK

SEQ ID NO: 8938 - protein, 15 aa, Homo sapiens
YFDYWGQGVLVTVSS

SEQ ID NO: 8939 - protein, 11 aa, Homo sapiens
TFGQGTKVEIK

SEQ ID NO: 8940 - protein, 13 aa, Homo sapiens
DYWGQGTLVTVSS

SEQ ID NO: 8941 - protein, 11 aa, Homo sapiens
TFGQGTKVEIK

SEQ ID NO: 8942 - protein, 13 aa, Homo sapiens
EYWGQGTLVTVSS

SEQ ID NO: 8943 - protein, 11 aa, Homo sapiens
TFGPGTKVDIK

SEQ ID NO: 8944 - protein, 15 aa, Homo sapiens
WFDPWGQGTLVTVSS

SEQ ID NO: 8945 - protein, 11 aa, Homo sapiens
TFGQGTKVEIK

SEQ ID NO: 8946 - protein, 15 aa, Homo sapiens
AFNIWGQGTMVTVSS

SEQ ID NO: 8947 - protein, 12 aa, Homo sapiens
FTFGPGTKVDIK

SEQ ID NO: 8948 - protein, 16 aa, Homo sapiens
FFMDVWGKGTTVTVSS

SEQ ID NO: 8949 - protein, 11 aa, Homo sapiens
TFGQGTKVEIK

SEQ ID NO: 8950 - protein, 14 aa, Homo sapiens
FNYWGQGTLVTVSS

SEQ ID NO: 8951 - protein, 12 aa, Homo sapiens
LTFGGGTKVEIK

SEQ ID NO: 8952 - protein, 13 aa, Homo sapiens
EYWGQGTLVTVSS

SEQ ID NO: 8953 - protein, 11 aa, Homo sapiens
TFGQGTKVEIK

SEQ ID NO: 8954 - protein, 16 aa, Homo sapiens
YGLDVWGQGTTVTVSS

SEQ ID NO: 8955 - protein, 11 aa, Homo sapiens
TFGGGTKVEIK

SEQ ID NO: 8956 - protein, 15 aa, Homo sapiens
GFDVWGQGTMVTVSS

SEQ ID NO: 8957 - protein, 12 aa, Homo sapiens
LTFGGGTKVEIK

SEQ ID NO: 8958 - protein, 15 aa, Homo sapiens
YFDHWGQGILVTVSS

SEQ ID NO: 8959 - protein, 11 aa, Homo sapiens
TFGGGTKVEIK

SEQ ID NO: 8960 - protein, 14 aa, Homo sapiens
FDYWGQGTLVTVSS

SEQ ID NO: 8961 - protein, 11 aa, Homo sapiens
TFGGGTKVEIK

SEQ ID NO: 8962 - protein, 17 aa, Homo sapiens
YYGLDDWGQGTTVTVSS

SEQ ID NO: 8963 - protein, 12 aa, Homo sapiens
ITFGRGTRLEIK

SEQ ID NO: 8964 - protein, 16 aa, Homo sapiens
YAMDVWGQGTTVTVSS

SEQ ID NO: 8965 - protein, 12 aa, Homo sapiens
YNFGQGTKVEIK

SEQ ID NO: 8966 - protein, 14 aa, Homo sapiens
FDYWGQGTLVTVSS

SEQ ID NO: 8967 - protein, 11 aa, Homo sapiens
SFGQGTKVEIK

SEQ ID NO: 8968 - protein, 16 aa, Homo sapiens
YYMEVWGKGTTVTVSS

SEQ ID NO: 8969 - protein, 11 aa, Homo sapiens
TFGGGTKVEIK

SEQ ID NO: 8970 - protein, 13 aa, Homo sapiens
DFWGQGTLVTVSS

SEQ ID NO: 8971 - protein, 11 aa, Homo sapiens
TFGQGTKVEIK

SEQ ID NO: 8972 - protein, 13 aa, Homo sapiens
GDWGQGTLVTVSS

SEQ ID NO: 8973 - protein, 11 aa, Homo sapiens
TFGGGTKVEIK

SEQ ID NO: 8974 - protein, 13 aa, Homo sapiens
DHWGQGTLVTVSS

SEQ ID NO: 8975 - protein, 11 aa, Homo sapiens
TFGQGTKVEIK

SEQ ID NO: 8976 - protein, 13 aa, Homo sapiens
DVWGQGTTVTVSS

SEQ ID NO: 8977 - protein, 12 aa, Homo sapiens
FNFGPGTKVDIK

SEQ ID NO: 8978 - protein, 11 aa, Homo sapiens
WGQGTLVTVSS

SEQ ID NO: 8979 - protein, 11 aa, Homo sapiens
TFGQGTKVEIK

SEQ ID NO: 8980 - protein, 12 aa, Homo sapiens
YWGQGTLVTVSS

SEQ ID NO: 8981 - protein, 12 aa, Homo sapiens
ITFGQGTRLEIK

SEQ ID NO: 8982 - protein, 15 aa, Homo sapiens
AFDIWGQGTMVTVSS

SEQ ID NO: 8983 - protein, 11 aa, Homo sapiens
TFGQGTRLEIK

SEQ ID NO: 8984 - protein, 18 aa, Homo sapiens
YYYYMDVWGKGTTVTVSS

SEQ ID NO: 8985 - protein, 12 aa, Homo sapiens
WTFGQGTKVEIK

SEQ ID NO: 8986 - protein, 15 aa, Homo sapiens
YFDYWGQGTLVTVSS

SEQ ID NO: 8987 - protein, 11 aa, Homo sapiens
TFGPGTKVDIK

SEQ ID NO: 8988 - protein, 15 aa, Homo sapiens
YFDYWGQGTLVTVSS

SEQ ID NO: 8989 - protein, 12 aa, Homo sapiens
LTFGGGTKVEIK

SEQ ID NO: 8990 - protein, 14 aa, Homo sapiens
FDYWGQGTLVTVSS

SEQ ID NO: 8991 - protein, 12 aa, Homo sapiens
WTFGQGTKVEIK

SEQ ID NO: 8992 - protein, 16 aa, Homo sapiens
YYMDVWGKGTTVTVSS

SEQ ID NO: 8993 - protein, 12 aa, Homo sapiens
CSFGQGTKVEIK

SEQ ID NO: 8994 - protein, 18 aa, Homo sapiens
YYYYMDVWGKGTTVTVSS

SEQ ID NO: 8995 - protein, 12 aa, Homo sapiens
WTFGQGTKVEIK

SEQ ID NO: 8996 - protein, 14 aa, Homo sapiens
FDYWGQGTLVTVSS

SEQ ID NO: 8997 - protein, 12 aa, Homo sapiens
WTFGQGTKVEIK

SEQ ID NO: 8998 - protein, 16 aa, Homo sapiens
NWFDPWGQGTLVTVSS

SEQ ID NO: 8999 - protein, 15 aa, Homo sapiens
YFDYWGQGTLVTVSS

SEQ ID NO: 9000 - protein, 18 aa, Homo sapiens
YYYGMDVWGQGTTVTVSS

SEQ ID NO: 9001 - protein, 11 aa, Homo sapiens
TFGQGTRLEIK

SEQ ID NO: 9002 - protein, 14 aa, Homo sapiens
FGYWGQGTLVTVSS

SEQ ID NO: 9003 - protein, 12 aa, Homo sapiens
WTFGQGTKVEIK

SEQ ID NO: 9004 - protein, 14 aa, Homo sapiens
FDYWGQGTLVTVSS

SEQ ID NO: 9005 - protein, 12 aa, Homo sapiens
LTFGGGTKVEIK

SEQ ID NO: 9006 - protein, 12 aa, Homo sapiens
LTFGGGTKVEIK

SEQ ID NO: 9007 - protein, 11 aa, Homo sapiens
TFGQGTKVEIK

SEQ ID NO: 9008 - protein, 11 aa, Homo sapiens
WGHGTLVTVSS

SEQ ID NO: 9009 - protein, 10 aa, Homo sapiens
FGQGTKVEIK

SEQ ID NO: 9010 - protein, 11 aa, Homo sapiens
WGKGTTVTVSS

SEQ ID NO: 9011 - protein, 10 aa, Homo sapiens
FGQGTKVEIK

SEQ ID NO: 9012 - protein, 11 aa, Homo sapiens
WGLGTMVTVSS

SEQ ID NO: 9013 - protein, 10 aa, Homo sapiens
FGPGTKVDIK

SEQ ID NO: 9014 - protein, 11 aa, Homo sapiens
WGQGALVTVSS

SEQ ID NO: 9015 - protein, 10 aa, Homo sapiens
FGQGTRLEIK

SEQ ID NO: 9016 - protein, 11 aa, Homo sapiens
WGQGTMVTVSS

SEQ ID NO: 9017 - protein, 10 aa, Homo sapiens
FGGGTKVEIK

SEQ ID NO: 9018 - protein, 11 aa, Homo sapiens
WGQGVLVTVSS

SEQ ID NO: 9019 - protein, 10 aa, Homo sapiens
FGQGTKVEIK

SEQ ID NO: 9020 - protein, 11 aa, Homo sapiens
WGQGTLVTVSS

SEQ ID NO: 9021 - protein, 10 aa, Homo sapiens
FGQGTKVEIK

SEQ ID NO: 9022 - protein, 11 aa, Homo sapiens
WGQGTLVTVSS

SEQ ID NO: 9023 - protein, 10 aa, Homo sapiens
FGPGTKVDIK

SEQ ID NO: 9024 - protein, 11 aa, Homo sapiens
WGQGTLVTVSS

SEQ ID NO: 9025 - protein, 10 aa, Homo sapiens
FGQGTKVEIK

SEQ ID NO: 9026 - protein, 11 aa, Homo sapiens
WGQGTMVTVSS

SEQ ID NO: 9027 - protein, 10 aa, Homo sapiens
FGPGTKVDIK

SEQ ID NO: 9028 - protein, 11 aa, Homo sapiens
WGKGTTVTVSS

SEQ ID NO: 9029 - protein, 10 aa, Homo sapiens
FGQGTKVEIK

SEQ ID NO: 9030 - protein, 11 aa, Homo sapiens
WGQGTLVTVSS

SEQ ID NO: 9031 - protein, 10 aa, Homo sapiens
FGGGTKVEIK

SEQ ID NO: 9032 - protein, 11 aa, Homo sapiens
WGQGTLVTVSS

SEQ ID NO: 9033 - protein, 10 aa, Homo sapiens
FGQGTKVEIK

SEQ ID NO: 9034 - protein, 11 aa, Homo sapiens
WGQGTTVTVSS

SEQ ID NO: 9035 - protein, 10 aa, Homo sapiens
FGGGTKVEIK

SEQ ID NO: 9036 - protein, 11 aa, Homo sapiens
WGQGTMVTVSS

SEQ ID NO: 9037 - protein, 10 aa, Homo sapiens
FGGGTKVEIK

SEQ ID NO: 9038 - protein, 11 aa, Homo sapiens
WGQGILVTVSS

SEQ ID NO: 9039 - protein, 10 aa, Homo sapiens
FGGGTKVEIK

SEQ ID NO: 9040 - protein, 11 aa, Homo sapiens
WGQGTLVTVSS

SEQ ID NO: 9041 - protein, 10 aa, Homo sapiens
FGGGTKVEIK

SEQ ID NO: 9042 - protein, 11 aa, Homo sapiens
WGQGTTVTVSS

SEQ ID NO: 9043 - protein, 10 aa, Homo sapiens
FGRGTRLEIK

SEQ ID NO: 9044 - protein, 11 aa, Homo sapiens
WGQGTTVTVSS

SEQ ID NO: 9045 - protein, 10 aa, Homo sapiens
FGQGTKVEIK

SEQ ID NO: 9046 - protein, 11 aa, Homo sapiens
WGQGTLVTVSS

SEQ ID NO: 9047 - protein, 10 aa, Homo sapiens
FGQGTKVEIK

SEQ ID NO: 9048 - protein, 11 aa, Homo sapiens
WGKGTTVTVSS

SEQ ID NO: 9049 - protein, 10 aa, Homo sapiens
FGGGTKVEIK

SEQ ID NO: 9050 - protein, 11 aa, Homo sapiens
WGQGTLVTVSS

SEQ ID NO: 9051 - protein, 10 aa, Homo sapiens
FGQGTKVEIK

SEQ ID NO: 9052 - protein, 11 aa, Homo sapiens
WGQGTLVTVSS

SEQ ID NO: 9053 - protein, 10 aa, Homo sapiens
FGGGTKVEIK

SEQ ID NO: 9054 - protein, 11 aa, Homo sapiens
WGQGTLVTVSS

SEQ ID NO: 9055 - protein, 10 aa, Homo sapiens
FGQGTKVEIK

SEQ ID NO: 9056 - protein, 11 aa, Homo sapiens
WGQGTTVTVSS

SEQ ID NO: 9057 - protein, 10 aa, Homo sapiens
FGPGTKVDIK

SEQ ID NO: 9058 - protein, 11 aa, Homo sapiens
WGQGTLVTVSS

SEQ ID NO: 9059 - protein, 10 aa, Homo sapiens
FGQGTKVEIK

SEQ ID NO: 9060 - protein, 11 aa, Homo sapiens
WGQGTLVTVSS

SEQ ID NO: 9061 - protein, 10 aa, Homo sapiens
FGQGTRLEIK

SEQ ID NO: 9062 - protein, 11 aa, Homo sapiens
WGQGTMVTVSS

SEQ ID NO: 9063 - protein, 10 aa, Homo sapiens
FGQGTRLEIK

SEQ ID NO: 9064 - protein, 11 aa, Homo sapiens
WGKGTTVTVSS

SEQ ID NO: 9065 - protein, 10 aa, Homo sapiens
FGQGTKVEIK

SEQ ID NO: 9066 - protein, 11 aa, Homo sapiens
WGQGTLVTVSS

SEQ ID NO: 9067 - protein, 10 aa, Homo sapiens
FGPGTKVDIK

SEQ ID NO: 9068 - protein, 11 aa, Homo sapiens
WGQGTLVTVSS

SEQ ID NO: 9069 - protein, 10 aa, Homo sapiens
FGGGTKVEIK

SEQ ID NO: 9070 - protein, 11 aa, Homo sapiens
WGQGTLVTVSS

SEQ ID NO: 9071 - protein, 10 aa, Homo sapiens
FGQGTKVEIK

SEQ ID NO: 9072 - protein, 11 aa, Homo sapiens
WGKGTTVTVSS

SEQ ID NO: 9073 - protein, 10 aa, Homo sapiens
FGQGTKVEIK

SEQ ID NO: 9074 - protein, 11 aa, Homo sapiens
WGKGTTVTVSS

SEQ ID NO: 9075 - protein, 10 aa, Homo sapiens
FGQGTKVEIK

SEQ ID NO: 9076 - protein, 11 aa, Homo sapiens
WGQGTLVTVSS

SEQ ID NO: 9077 - protein, 10 aa, Homo sapiens
FGQGTKVEIK

SEQ ID NO: 9078 - protein, 11 aa, Homo sapiens
WGQGTLVTVSS

SEQ ID NO: 9079 - protein, 11 aa, Homo sapiens
WGQGTLVTVSS

SEQ ID NO: 9080 - protein, 11 aa, Homo sapiens
WGQGTTVTVSS

SEQ ID NO: 9081 - protein, 10 aa, Homo sapiens
FGQGTRLEIK

SEQ ID NO: 9082 - protein, 11 aa, Homo sapiens
WGQGTLVTVSS

SEQ ID NO: 9083 - protein, 10 aa, Homo sapiens
FGQGTKVEIK

SEQ ID NO: 9084 - protein, 11 aa, Homo sapiens
WGQGTLVTVSS

SEQ ID NO: 9085 - protein, 10 aa, Homo sapiens
FGGGTKVEIK

SEQ ID NO: 9086 - protein, 10 aa, Homo sapiens
FGGGTKVEIK

SEQ ID NO: 9087 - protein, 10 aa, Homo sapiens
FGQGTKVEIK

SEQ ID NO: 9088 - protein, 12 aa, Homo sapiens
CARDFDRGAEHW

SEQ ID NO: 9089 - protein, 11 aa, Homo sapiens [sequence omitted]

SEQ ID NO: 9090 - protein, 20 aa, Homo sapiens
CTRDFLEWSRPYYYHFMDVW

SEQ ID NO: 9091 - protein, 11 aa, Homo sapiens [sequence omitted]

SEQ ID NO: 9092 - protein, 12 aa, Homo sapiens
CARAARGRLNIW

SEQ ID NO: 9093 - protein, 13 aa, Homo sapiens [sequence omitted]

SEQ ID NO: 9094 - protein, 13 aa, Homo sapiens
CTRDSGITRFDYW

SEQ ID NO: 9095 - protein, 11 aa, Homo sapiens [sequence omitted]

SEQ ID NO: 9096 - protein, 24 aa, Homo sapiens
CAKSLFSGTVDDNNGFYFDAFDIW

SEQ ID NO: 9097 - protein, 13 aa, Homo sapiens [sequence omitted]

SEQ ID NO: 9098 - protein, 12 aa, Homo sapiens
CARTSSAYFDYW

SEQ ID NO: 9099 - protein, 11 aa, Homo sapiens [sequence omitted]

SEQ ID NO: 9100 - protein, 12 aa, Homo sapiens
CAKDAYSVPDYW

SEQ ID NO: 9101 - protein, 11 aa, Homo sapiens
CQHYYTEPETF

SEQ ID NO: 9102 - protein, 17 aa, Homo sapiens
CARPVRNGIAPSAIEYW

SEQ ID NO: 9103 - protein, 10 aa, Homo sapiens [sequence omitted]

SEQ ID NO: 9104 - protein, 15 aa, Homo sapiens
CARAAGGTLGWFDPW

SEQ ID NO: 9105 - protein, 11 aa, Homo sapiens [sequence omitted]

SEQ ID NO: 9106 - protein, 21 aa, Homo sapiens
CATSNLDYMIGWAHRGAFNIW

SEQ ID NO: 9107 - protein, 11 aa, Homo sapiens [sequence omitted]

SEQ ID NO: 9108 - protein, 20 aa, Homo sapiens
CARPGDYRTIRYYHFFMDVW

SEQ ID NO: 9109 - protein, 12 aa, Homo sapiens [sequence omitted]

SEQ ID NO: 9110 - protein, 18 aa, Homo sapiens
CATDRYEGKWSVDRFNYW

SEQ ID NO: 9111 - protein, 11 aa, Homo sapiens [sequence omitted]

SEQ ID NO: 9112 - protein, 10 aa, Homo sapiens
CIADWHPEYW

SEQ ID NO: 9113 - protein, 12 aa, Homo sapiens
CMQTALWPPNTF

SEQ ID NO: 9114 - protein, 17 aa, Homo sapiens
CAAYFGGSASNYGLDVW

SEQ ID NO: 9115 - protein, 11 aa, Homo sapiens
CMQASQTPQTF

SEQ ID NO: 9116 - protein, 17 aa, Homo sapiens
CARPKYSSSSYSGFDVW

SEQ ID NO: 9117 - protein, 11 aa, Homo sapiens [sequence omitted]

SEQ ID NO: 9118 - protein, 11 aa, Homo sapiens
CAPETYYFDHW

SEQ ID NO: 9119 - protein, 10 aa, Homo sapiens
CQQRSQLVTF

SEQ ID NO: 9120 - protein, 23 aa, Homo sapiens
CAKDINTAQYCNIVNCYGEFDYW

SEQ ID NO: 9121 - protein, 10 aa, Homo sapiens [sequence omitted]

SEQ ID NO: 9122 - protein, 27 aa, Homo sapiens
CARGGYQDSTGYHYDDDGPRYYGLDDW

SEQ ID NO: 9123 - protein, 11 aa, Homo sapiens
CQQSYTPLITF

SEQ ID NO: 9124 - protein, 26 aa, Homo sapiens
CARDPTPVAGRVRRAISDYQYAMDVW

SEQ ID NO: 9125 - protein, 12 aa, Homo sapiens
CQHYGASPLYNF

SEQ ID NO: 9126 - protein, 17 aa, Homo sapiens
CAKDADTTGYYDPFDYW

SEQ ID NO: 9127 - protein, 10 aa, Homo sapiens
CQQYHEYHSF

SEQ ID NO: 9128 - protein, 22 aa, Homo sapiens
CATRGVEDCSGIDCSLYYMEVW

SEQ ID NO: 9129 - protein, 11 aa, Homo sapiens
CQKYDNWPVTF

SEQ ID NO: 9130 - protein, 16 aa, Homo sapiens
CARVAGRGYRDYTDFW

SEQ ID NO: 9131 - protein, 11 aa, Homo sapiens [sequence omitted]

SEQ ID NO: 9132 - protein, 14 aa, Homo sapiens
CARSSRSFGDYGDW

SEQ ID NO: 9133 - protein, 10 aa, Homo sapiens
CQQRSQLVTF

SEQ ID NO: 9134 - protein, 16 aa, Homo sapiens
CAKDSVFNFGSRDDHW

SEQ ID NO: 9135 - protein, 11 aa, Homo sapiens [sequence omitted]

SEQ ID NO: 9136 - protein, 13 aa, Homo sapiens
CARSTVIMPPDVW

SEQ ID NO: 9137 - protein, 11 aa, Homo sapiens
CQQNHNVLFNF

SEQ ID NO: 9138 - protein, 11 aa, Homo sapiens
CARGGSGSYGW

SEQ ID NO: 9139 - protein, 11 aa, Homo sapiens [sequence omitted]

SEQ ID NO: 9140 - protein, 19 aa, Homo sapiens
CARANSDRYYYDSSGYSYW

SEQ ID NO: 9141 - protein, 11 aa, Homo sapiens [sequence omitted]

SEQ ID NO: 9142 - protein, 18 aa, Homo sapiens
CAKAGIAAAGTNYAFDIW

SEQ ID NO: 9143 - protein, 13 aa, Homo sapiens [sequence omitted]

SEQ ID NO: 9144 - protein, 21 aa, Homo sapiens
CARVVDIAARPEGYYYYMDVW

SEQ ID NO: 9145 - protein, 10 aa, Homo sapiens [sequence omitted]

SEQ ID NO: 9146 - protein, 19 aa, Homo sapiens
CARGLGLEWRLSPGYFDYW

SEQ ID NO: 9147 - protein, 11 aa, Homo sapiens [sequence omitted]

SEQ ID NO: 9148 - protein, 15 aa, Homo sapiens
CAKDSEGYEYYFDYW

SEQ ID NO: 9149 - protein, 11 aa, Homo sapiens [sequence omitted]

SEQ ID NO: 9150 - protein, 17 aa, Homo sapiens
CARDGDSSGWYARFDYW

SEQ ID NO: 9151 - protein, 12 aa, Homo sapiens [sequence omitted]

SEQ ID NO: 9152 - protein, 19 aa, Homo sapiens
CARARTVGFGESAYYMDVW

SEQ ID NO: 9153 - protein, 10 aa, Homo sapiens
CMQALHPCSF

SEQ ID NO: 9154 - protein, 17 aa, Homo sapiens
CTTDRWGSSYYYYMDVW

SEQ ID NO: 9155 - protein, 11 aa, Homo sapiens [sequence omitted]

SEQ ID NO: 9156 - protein, 17 aa, Homo sapiens
CARDADSSGWYAHFDYW

SEQ ID NO: 9157 - protein, 12 aa, Homo sapiens [sequence omitted]

SEQ ID NO: 9158 - protein, 18 aa, Homo sapiens
CARNPDVYDFGSNWFDPW

SEQ ID NO: 9159 - protein, 20 aa, Homo sapiens
CARAPDDFWSGYWGYYFDYW

SEQ ID NO: 9160 - protein, 18 aa, Homo sapiens
CARGLHSSSDYYYGMDVW

SEQ ID NO: 9161 - protein, 11 aa, Homo sapiens [sequence omitted]

SEQ ID NO: 9162 - protein, 12 aa, Homo sapiens
CTTDPYPTFGYW

SEQ ID NO: 9163 - protein, 11 aa, Homo sapiens [sequence omitted]

SEQ ID NO: 9164 - protein, 19 aa, Homo sapiens
CAKDYTPYALEWLPLFDYW

SEQ ID NO: 9165 - protein, 12 aa, Homo sapiens [sequence omitted]

SEQ ID NO: 9166 - protein, 11 aa, Homo sapiens [sequence omitted]

SEQ ID NO: 9167 - protein, 10 aa, Homo sapiens [sequence omitted]

SEQ ID NO: 9168 - DNA, 352 bp, Homo sapiens; identical to SEQ ID NO: 4853

SEQ ID NO: 9169 - DNA, 333 bp, Homo sapiens
ttgtgatgactcagtctccactctccctgcccgtcacccttggacagccggcctccatctcctgcaggtctagtcaaggcctcgtgtccagtgatggaaccacctacttgagttggtatcagcagaggccaggccaatctccgaggcgcctattttataaggtttctgagcgggactctggggtcccagacagattcagcggcagtgggtcaggcactgatttcaccctgaaaatcagcagggtggaggctgaggatgttggggtttattactgcttgcaaggtacacactggcctcgaacgttcggccaagggaccaaggtggaaatcaaac

SEQ ID NO: 9170 - DNA, 381 bp, Homo sapiens
gaggtgcagctggtggagtctgggggaggcttggtccagcctggagggtccctgaaactctcctgtgcagcttctggattcagattcagtgaccactacatgaactgggtccgccaggctccagggaagggactggagtggattggccgtattagaaacaaagctaacagttttatcacagaatacgccgcgtctgtgaaagacagattcagcatctcaagagatgactcaaagaattcactgtatctgcaaatgcacagcctgaagagcgaggacacggccatgtatttttgtactagagattttttggagtggtcccgcccttactactaccacttcatggacgtctggggcaaagggaccacggtcaccgtctcctca

SEQ ID NO: 9171 - DNA, 340 bp, Homo sapiens
gacatcgtgatgacccagtctccagacttcctggctgtgtctctgggcgagagggccaccatcaactgcaagtccagccagaatgttttatacaactccaacaataagaactacttagcttggtaccagcagataccagggcagcctcctaagttggtcatttactgggcatctacccgcgaatccggggtccctgaccgattcagtggcaacgggtctgggacagatttcactctcaccatcagcagcctgcaggctgaagatgtggccgtttattactgtcagcagtattatactactcctccgacgttcggccaagggaccaaggtggaaatcaaac

SEQ ID NO: 9172 - DNA, 351 bp, Homo sapiens
tgcagctgcaggagtccggctcaggactggtgaggccctcacagaccctgtccctcacgtgcgctgtctctggtgtctccatcagtagtggcacttactcctggtgctggatccggcagccaccgggggagggcctgcagtggattgggtacatgtctcatagtgggcggacctacaataatccgtcactcaagagtcgagtcatcatgtcagtagataggtccaagaaccagctctccctgatgttgacttctgtgaccgccgcagacacggccgtgtatttctgcgccagagccgctcgagggcgtttgaatatctggggcctagggacaatggtcaccgtctcttcag

SEQ ID NO: 9173 - DNA, 328 bp, Homo sapiens
gacatccagatgacccagtctccatcctccctgtctgcatctgtgggagacagagtcaccatcacttgccaggcgagtcaggacattagcaactctttaaattggtatcagcaaaaaccagggaaagcccctaaactcctgatctacgatgcatccaatttggaaacgggggtcccatcaaggttcagtggaagtggatctgggacacatttcactttcaccatcagcagcctgcagccagaagatattggaacatattactgtcaacagtatgataatctgcctcccatattcactttcggccctgggaccaaagtggatatcaaac

SEQ ID NO: 9174 - DNA, 355 bp, Homo sapiens
gaggtgcagctggtggagtctgggggaggctcggtccagcctggggggtccctgagactttcctgtgtagcctctggattcacctttagtaacttttggatgagttgggtccgccaggctccagggaaggggctggagtgggtggccaacatcaggcaagatgggggtgagagatattatgtgggctctgcgaggggccgattcaccatcgccagagacaacgccaacaactcactatatctccaaatgaacagcctgagagtcgaggacacggctgtttattattgtacgagagattctggcattactcgttttgattattggggccagggagccctggtcaccgtctcctcag

SEQ ID NO: 9175 - DNA, 333 bp, Homo sapiens
ttgtgatgactcagtctccactctccctgcccgtcacccttggacagccggcctccatctcctgtaggtctagtcaaagcctcgtatacagtgatggaaacacctacttgaattggtttcagcagaggccaggccaatctccaaggcgcctaatttatagggtttctaagcgggactctggggtcccagacagattcagcggcagtgggtcaggctctgatttcacactgaaaatcagcagggtggaggctgaggatgttggggtttattactgcatgcaaggtacacactggcctccggccttcggccaagggacacgactggagattaaac

SEQ ID NO: 9176 - DNA, 388 bp, Homo sapiens
gaggtgcagctgttggagtctgggggaggcttggcacagcctggggggtccctcagactctcctgtgcagcctctggattcacctttagcggctatgccatgacctgggtccgccaggctccagggaaggggctggagtgggtctcaggtcttagccgcgatggtgctgacacatcctacgcagactccgtgaagggtcgattaatcatctccagagacaattccaagaacacgctgtatctgcaaatccacaacctgaaagccgaagacacggccgtatattactgtgcgaaatccctcttctccggcactgtggatgataataatggtttttactttgatgcttttgatatctggggccaagggacaatggtcaccgtctcttcag

SEQ ID NO: 9177 - DNA, 328 bp, Homo sapiens
gaaattgtgttgacacagtctccagccaccctgtctttgtctccaggggaaagagccaccctctcctgcagggccagtcagagtgttagtaggtccttagcctggtaccaacagaaacctggccaggctcccaggctcctcatctatggtgcatccaacagggtcactggcatcccagccaggttcagtggcagtgggtctgggacagacttcactctcaccatcagcagcctagagcctgaagattttgcattttattactgtcagcagcggagtaactggcccccgacgctcactttcggcggagggaccaaggtggagatcaaac

SEQ ID NO: 9178 - DNA, 352 bp, Homo sapiens
gaggtgcagctggtggagtctgggggaggcttggtccagcctggggggtccctgagcctctcctgtgcagcctctggattcacctttagtaatttttggatgagctgggtccgccaggctccagggaaggggctggagtgggtggccaacataaagcaagatggaagtgagaagtactatgtggactctgtgaggggccgattcaccttctccagagacaacgccaacaactcgctacttctgcagatgaacagcctgagagccgacgacacggctgtttattactgtgcgagaacctcctcggcctactttgactactggggccagggagtcctggtcaccgtctcctcag

SEQ ID NO: 9179 - DNA, 322 bp, Homo sapiens
gaaattgtgttgacacagtctccacccaccctgtctttgtctccaggggaaggagccaccctctcctgcagggccagtcagagtgttagcggctccttagcctggtaccaacagaaacctggccaggctcccagactcctcatctatgatacatccaagagggccactggcatcccagccaggttcagtggcagtgggtctgggacagacttcactctcaccatcagcagcctagagcctgaagattttgcagtttattactgtcagcagcgtagcaactggcctcagacgttcggccaagggaccaaggtggaaatcaaac

SEQ ID NO: 9180 - DNA, 352 bp, Homo sapiens
gaggtgcagctggtggagtctgggggaggcttggtgcagcctggggggtccctgagactctcctgcgcagcctctggattcacttttagtagccattggatggcctgggtccgccaggctccagggaaggggctggagtgggtggccaatataaagaaggatggaagtgagacaaactatgtggactctgtgaagggccgattcaccatctccagagacaacgccaagaacgcactttatctgcaaatgaatagcctgagagtcgaggacacggcggtgtattactgtgcgaaagatgcctacagcgttcctgactactggggccagggaaccctggtcaccgtctcctcag

SEQ ID NO: 9181 - DNA, 340 bp, Homo sapiens
gacatcgtgatgacccagtctccagactccctggctgtgtctctgggcgagagggccaccatcaattgcaagtccagccggagtcttttaagcagctccaacaacaagaactacttagcttggtaccagcagaaatcaggacagcctcctagactgctcatgttctgggcatctgcgcgggaatccggtgtccctgaccgattcagtggcagcgggtctgggacagatttcactctcaccatcagcagcctgcaggctgaggatgtggcagtttattactgtcagcattattatactgaacctgagacgttcggccaagggaccaaggtggaaatcaaac

SEQ ID NO: 9182 - DNA, 366 bp, Homo sapiens
aggtgcagctggtgcagtctgggcctgaggtgaagaagtctggggcctcagtgaagatttcctgcaaggcttctggatacaccttcagtaactatgctgtacattgggtgcgccaggcccccggacaaaggcctgagtggatggggtggagcaacgctggcagtggtgccacaaaatattcacagaatttccagggcagactcaccattgtcagggacacatccgcgaacacagtcttcatggagctgagcagcctgacatctgaggacacggctgtatattactgtgcgagaccagtgagaaacggcatagcacctagtgctatcgaatactggggccagggaaccctggtcaccgtctcctcag

SEQ ID NO: 9183 - DNA, 337 bp, Homo sapiens
gacatcgtgatgacccagtctccagactccctggctgtgtctctgggcgagagggccaccatcaactgcaagtccagccagagtgttttttacaggtccaccaataagaactacttagcttggtaccagcagaaaccaggacagcctcctaagttgctcattcactgggcatctacccgggaatccggggtccctgaccgattcagtggcagcgggtctgggacagatttcactctcaccatcagcagcctgcaggctgaagatgtggcagtttattactgtcagcaatattataatacgatcactttcggccctgggaccaaagtggatatcaaac

SEQ ID NO: 9184 - DNA, 358 bp, Homo sapiens
gtgcagctggtgcagtctggagcagaggtgaaaaagcccggggagtctctgaggatctcctgtaaggcttctggctacacctttaccacctactatatcacctgggtgcgccagatgaccgggaaaggcctggagtggatggggaggattgatcctcgtgactcttatagcaactacaacccgtccttcgaaggccacgtcactatgtcagttgacaagtccatcactactgcctacctgcagtggagtggcctgaaggcctcggacaccgccatttattactgtgcgagagccgcaggtggtacgttgggctggttcgacccctggggccagggaaccctggtcaccgtctcctcag

SEQ ID NO: 9185 - DNA, 322 bp, Homo sapiens
gacatccagatgacccagtctccttccaccctgtctgcatctgtaggagacagagtcaccatcacttgccgggccagtcagagtattagtagctggttggcctggtatcagcagaaaccagggaaagcccctaagctcctgatctataaggcgtctagtttagaaagtggggtcccatcaaggttcagcggcagtggatctgggacagaattcactctcaccatcagcagcctgcagcctgatgattttgcaacttattactgccaacagtataatagttatccccgaacgttcggccaagggaccaaggtggaaatcaaac

SEQ ID NO: 9186 - DNA, 376 bp, Homo sapiens
caggtgcagctgcaggagtcgggcccaggactggtgaagccttcggagaccctgtccctcacctgctctgtctctggtgactccatgagtactttctactggagctggatccggcagcccccagggaagggactggagtggattgggtttatgcaccatagtgggagtgccggctacaatccctccctcaagagtcgagtcgccttttcagtagacacgtccaagaatcagttctccctgagattgacctctgtgaccgctgcggacacggccatatattattgtgcgacctccaacctagactatatgattggctgggcccaccggggcgcttttaatatctggggccaagggacaatggtcaccgtctcttcag

SEQ ID NO: 9187 - DNA, 322 bp, Homo sapiens
gacatccagatgacccagtctccttccacactgtctgcatctgtaggagacagagtcactattacttgtcgggccagtcaggatatcggtaactggttggcctggtatcaacagaagccagggaaagcccctagcctcctcatctatgatgtttccactttgcaaagtggggtcccatcaaggttcagcggccgtagatctgggacagaattcactctcaccatcagcagcctgcagcctgatgatcttgcaacttattactgccaacagtataatagttatcttttcactttcggccctgggaccaaagtggatatcaaac

SEQ ID NO: 9188 - DNA, 374 bp, Homo sapiens
aggtgcagctggtgcagtctggggctgaggtgaagaagcctgggtcctccgtgaaggtctcctgcagggcgtctggaggcaccttcagcagctttgctgtcagctgggtgcgacaggcccctggacaaggacttgaatggatgggagggatcatcggtatgtttgggacaacaaaatacgcacagaggttcctgggcagagtcacgattaccgcggacgagtctacgagctcagcctacatggagctgagcagcctgacatctgaggacacggccgtgtattattgtgcgagaccgggtgattatcgaaccattagatactatcacttcttcatggacgtctggggcaaagggaccacggtcaccgtctcctca

SEQ ID NO: 9189 - DNA, 328 bp, Homo sapiens
gaaattgtgttgacgcagtctccaggcaccctgtctttgtctccaggggaaagagccaccctctcctgcagggccagtcagagtgttagcagcagctacttagcctggtaccagcagaaacctggccaggctcccaggctcctcatctatggtacatccagcagggccactggcatcccagacaggttcagtggcagtgggtctgggacagacttcactctcaccatcagcagactggagcctgaagattttgcagtttattactgtcagcagtatggtagctcacctccggcaacgttcggccaagggaccaaggtggaaatcaaac

SEQ ID NO: 9190 - DNA, 370 bp, Homo sapiens
gaggtgcagctggtggagtctgggggaggcttggtccagcctgacgggtccctgagactctcctgtgtagcctctggattcacctttaattactattggatgatgtgggtccgccaggctccagggaaggggctggagtgggtggccaacataaaccgagatggaagtgagaaaaactatgtggactctgtgaagggccgattctccatctccagagacagcgtcaggaactcattgtatctgcaaatgaacagcctgagagccgaggacacggctgtctattactgtgcgacagataggtatgaaggcaaatggtccgtggatcgatttaactactggggccagggaactctggtcaccgtctcctcag

SEQ ID NO: 9191 - DNA, 322 bp, Homo sapiens
gacatccagatgacccagtctccatcctcactgtctgcatctgtaggagacagagttaccatcacttgtcgggcgagccagggcattaacaatgatgtagcctggtttcagcagaaaccagggaaagcccctaagtccctgatcaatgctgcatccagtttgcagagtggagtcccatcaaagttcagcggcagtggatctgggacagacttcactctcaccatcagcaacctgcagcctgaagattttgcaacttattactgccaacagtataatagttacccgctcactttcggcggagggaccaaggtggagatcaaac

SEQ ID NO: 9192 - DNA, 352 bp, Homo sapiens
gaggtgcagctggtggagtctgggggaggcttggtaaagcctggggggtcccttagactctcctgtgcagtctctggattcactttcagtaacgcctggatgagctgggtccgccaggctccagggaaggggctggagtgggttggccgttttaaaagcaaaagtggtggtgggacaacagactacgctgcacccgtgaagggcagatttaccatctcgagagatgattcaaagaacacgctgcatctacaaatgaacagtctgaaaaccgaggacacagccgtgtattactgtatcgccgactggcaccctgaatactggggccagggaaccctggtcaccgtctcctcag

SEQ ID NO: 9193 - DNA, 336 bp, Homo sapiens
ttgtgatgactcagtctccactctccctgcccgtcacccttggacagccggcctccatctcctgcaggtctagtcaaagcctcgtatacagtgatggaaacacctacttgaattggtttcagcagaggccaggccaatctccaaggcgcctaatttatatggtttctaaccgggactccggggtcccagacagattcagcggcagtgggtcaggcactgatttcacactgaaaatcagcagggtggaggctgaggatgttggggtttattactgcatgcagactgcactctggcctccgaacacttttggccaggggaccaaggtggagatcaaac

SEQ ID NO: 9194 - DNA, 362 bp, Homo sapiens
tgcagctggtgcagtctgggcctgaggtgaagaagcctgggacctcagtgaaggtctcctgcaaggcttctggatccacctttagtagctctgctgtgcagtgggtgcgacaggctcgtggacaacgccctgagtggataggatggatcgtcgttggtagtggtaacacaaattacgcacagaacttccaagacagagtcaccattaccagggacatgtccacaagcacagcctacatggagctgagcagcctgagatccgaggacacggccgtatattactgtgcggcatattttggtggcagcgcgtccaattacggtttggacgtctggggccaagggaccacggtcaccgtctcctca

SEQ ID NO: 9195 - DNA, 337 bp, Homo sapiens
gatattgtgatgactcagtctccactctccctgcccgtcacccctggagagccggcctccatctcctgcaggtctagtcagagcctcctgcataataatggatacaactatttggattggtacctgcagaagccagggcagtctccacacctcctgatctatttgggttctaatcgggcctccggggtccctgacaggttcagtggcagtggatcaggcacagattttacactggaaattagcagagtggaggctgaggatgttggggtctattactgcatgcaagcttcacaaactcctcagactttcggcggagggaccaaggtggaaatcaaac

SEQ ID NO: 9196 - DNA, 367 bp, Homo sapiens
gaggtgcagctggtgcagtctggcgcagaggtgaaaaagcccggggagtctctgaagatctcctgtaagggttctggatacagctttacgagctactggatcgcctgggtgcgccagatgcccgggaaaggcctggagtggatggggaccatccatcctggtgactctgataccacatacggcccgtccttccaaggccaggtcgccatctcagccgacaggtccatcagcaccgcctttctggagtggggcagtctgaaggcctcggacaccgccatgtattactgtgcgaggcccaagtatagcagcagctcttacagtggttttgatgtctggggccaagggacaatggtcaccgtctcttcag

SEQ ID NO: 9197 - DNA, 322 bp, Homo sapiens
gacatccagttgacccagtctccatccttcttgtctgcatctgtcggagacagagtcaccatcacttgcagggccagtcagggcattagcagttatttagcctggtatcagcaaaaaccagggaaagcccctaagctcctgatctatgctgcatccactttgcaaagtggggtcccagcgaggttcagcggcagtggatcggggacagaattcactctcacaatcagccgcctgcagcctgaagattttgcaactttttactgtcaacagcttcatagttcccctctcactttcggcggggggaccaaggtggagatcaaac

SEQ ID NO: 9198 - DNA, 349 bp, Homo sapiens
gaggtgcagctggtggagtctgggggaggtctggtccagcctggggggtccctgagactctcctgtgcagcctctggattcacatttagtaggttttggatgagttgggtccgccaggctccagggaaggggctggagtgggtggccaacataaaccaagatggaagtgagaaaaactatgtggactctgtggagggccgattcaccatctctagagacaacgccaagaactcactatatttgcaaatgaacagcctgagagccgaagacacggctgtgtatcactgtgcgccagagacgtattactttgaccactggggccagggaatcctggtcaccgtctcctcag

SEQ ID NO: 9199 - DNA, 319 bp, Homo sapiens
gaaattgtgttgacacagtctccagccaccctggttttgtctccaggggaaagagccaccctctcctgcagggccagtcactttgttaacaccttcttagcctggtatcaacagaaacctggccagtctcccaggctcctcatctctgatgcaaccatcagggccactggcatcccagccaggttcagtggcagtgggtctgggacagacttcactctcaccatcagcagcctagagcctgaagattgtgcagtttactactgtcagcagcgtagtcagttagtcactttcggcggagggaccaaggtggaaatcaaac

SEQ ID NO: 9200 - DNA, 382 bp, Homo sapiens
gtgcagctggtggagtctgggggaggcttggcacagcctggcgggtccctgagactctcctgtgcagcctctggattcaactttggttattataacatgcactggatccggcaagttccagggaagggcctggagtgggtctcaggtattagttggaatagtgttcacatagcctatgcggactctgtaaagggccgattcaccatctccagagacaatgccaaggactccctgtatctgcagatgaacagtctgagacctgacgacacggccttgtatttctgtgcaaaagatataaatacggcccaatattgtaatattgtcaattgctatggggaatttgactactggggccagggaaccctggtcaccgtctcctcag

SEQ ID NO: 9201 - DNA, 319 bp, Homo sapiens
gacatccagatgacccagtctccttccaccctgtctgcatctgtaggagacgtagtcaccatcacttgccgggccagtcagagtattagtagttggttggcctggtttcagcagagacccgggaaagcccctaagcccctgatctatagggcgtctcgtttacagagtggggtcccatcaaggttcagcggcagtggatctgggacagaattcactctcaccatcagcagcctgcagcctgatgattttgcaacttattactgccaacaatatgatacttatcccaccttcggcggagggaccaaggtggaaatcaaac

SEQ ID NO: 9202 - DNA, 395 bp, Homo sapiens
aggtgcagctggtgcagtctggggctgaggtgaagaagcctggggcctcagtgagggtctcctgtacggcttctggatacaggttcaccgactactacttccactgggtgcgacaggcccctggacaagggcttgagtggatgggaaggataaaccctaatactggtgagacaaactatgcacagaggttccagggcagcgtcaccatgaccagggacacgtccatcaatacaggatacatggagttgagacggctgtcattagacgacacggccgtctattattgtgcgagagggggttatcaggacagtacaggttatcactacgatgacgatgggccccgctactacggtttggacgactggggccaggggaccacggtcaccgtctcctca

SEQ ID NO: 9203 - DNA, 322 bp, Homo sapiens
gacatccagatgacccagtctccatcctccctgtctgcgtctattggagacagaatctccatcacttgccgggcaagtcagaccattggtagttacttgaattggtatcagcacaagccaggaaaagcccctaaactcctgatctctgctgcatccactttgcaaagtggggtcccatcgaggttcagtggcagtggatccgggacaggattcactctcaccatcagcagtctgcaacctgatgattctgcaacttactactgtcaacagagttacactcccttgatcacgttcggccgagggacacgactggagattaaac

SEQ ID NO: 9204 - DNA, 393 bp, Homo sapiens
gaggtgcagctggtggagtctgggggaggcctggtgacgccgggggggtccctgagactctcctgtgtaggttccgggttcaatttccgtggatacaggatgaactgggtccgccaggcacctgggaagggtcttgagtggatttcatacattactactgatagcactacgaagacctatgcagactctgtcaagggccgattcaccatctccagagacaatgccgggagttcattgcacctgcaaatgaacgacctgagagacgaggacacggctgtgtatttctgtgcgcgagatccgacgccagtggctggcagggtccgacgcgcgataagcgactaccaatacgccatggacgtctggggccaagggaccacggtcaccgtctcctca

SEQ ID NO: 9205 - DNA, 328 bp, Homo sapiens
gaaattgtgttgacgcagtctccaggcaccctgtctttgtctccaggggagagagcctccctctcctgcagggccagtcagagtattaataataggtatttagcctggtaccagcaaacacctggccaggctcccagactcctcatctttggtgcctccaatagggccactggcatcccaaataggttcagtggcagtgggtctgggacagacttcactctcaccatcagcagactggagcctgaagactttgcagtttattactgtcagcactatggtgcttcacccctatataattttggtcaggggaccaaggtggagatcaaac

SEQ ID NO: 9206 - DNA, 367 bp, Homo sapiens
caggtgcagctggtggagtctgggggaggcgtggtccagcctgggaggtccctgagactctcctgtgaagcctctggattcaccttcagtaggtttggcatgcactgggtccgccaggctccaggcaaggggctggagtggctggcagttatttcatatgatggaagtcatacatactatggagactccgtgaggggccgattcaccatctccagagacaattccaagaacacgctgtatctgcaagtgaacagcctgagacctgaggacacggctgtttattactgtgcgaaagatgctgatactactggctattatgatccttttgactactggggccagggaaccctggtcaccgtctcctcag

SEQ ID NO: 9207 - DNA, 319 bp, Homo sapiens
gacatccagatgacccagtctccttccaccctgtctgcacctgtaggagacagagtcaccatcacttgccgggccagtcagggtattaataactggttggcctggtatcagcagaaaccagggaaagcccctaaactcctgatctatcaggcgtctactttagaaagtggggtcccatcaaggttcagcggcagtggctctgggacagaattcactctcaccatcagcagcctgcagcctgaagattttgcaacttattactgccaacaatatcatgaatatcacagttttggccaggggaccaaggtggagatcaaac

SEQ ID NO: 9208 - DNA, 380 bp, Homo sapiens
tgcagctgcaggagtcgggcccgggactggtgaacccttcggagaccgtgtccctcacctgcactgtctctggtgggtccatcagtcgtagtcgttactactggggctgggtccgccagcccccagggaagggaccggagtggattgcaagtaccaaaactagtggacacacctggtacaacccgtccctcgagagtcgagtcaccatttccatggacacgtccaagaaccagatctccctgaatctgaggtctgtgaccgccgcagacacggctatatattactgtgcgactcgaggggtggaggactgtagtggtatcgactgctctttatactatatggaagtctggggcaaagggaccacggtcaccgtctcctca

SEQ ID NO: 9209 - DNA, 322 bp, Homo sapiens
gaaatagtgatgacgcagtctccagccaccctgtctgtgtctccaggggatagagccaccctctcctgcagggccagtcagagtgttggcagcaccttagcctggtaccagcagaaacctggccaggctcccaggctcctcatctatgctgcatccagcagggccactggtgtcccagccaggttcagtggcagtgggtctggtagagagttcactctcaccatcaacagcctgcagtctgaagattttgcagtttactactgtcagaagtatgataactggcccgtcactttcggcggagggaccaaggtggaaatcaaac

SEQ ID NO: 9210 - DNA, 364 bp, Homo sapiens
gaggtgcagctggtggagtctgggggaggcttggaacagcctggggggtccctgagactctcctgtggagtctctggattcaccttcagtgatcacagtatgcattgggtccgccaggctccagggcgggggctggagtggctttcattcattagtactagtggttccatcaggtactacgcagactctgtgaagggccgattcaccgtctccagagacaatgccaagaactcactttatctgcaaatggacagcctgagagacgaggacacggctctctactactgtgcgagagtggccgggagaggctacagagactacacggacttctggggccagggaaccctggtcaccgtctcctcag

SEQ ID NO: 9211 - DNA, 322 bp, Homo sapiens
gacatccagatgacccagtctccatcctcactgtctgcatctgtgggagacagagtcaccatcacttgtcgggcgagtcgtgacattagcgattatttagcctggtttcagcagaaaccaggcgaagcccctaagcccctgatctatggtgcatccagtttgcaaagtggcgtcccctcaaggttcagcggcagtggatctgggacagacttcactttcaccatcagcagcctgcagcctgaagattttggaacttatttctgccaacaatataatagttaccctcgaacttttggccaggggaccaaggtggaaatcaaac

SEQ ID NO: 9212 - DNA, 357 bp, Homo sapiens
tgcagctgcaggagtcgggcccaggactggtgaagccttcggagaccctgtccctcacctgcagtgtgtctggtgactccgtcggcagtggtccctactgctggggctggatccgccagtccccaggggggggactgcagtggattgggagtatttgtaatagaggggagtcgaactacactccgaccctcaagagtcgcctcgccatctccgcggacacatccaggaaccaggtctccctgaggctgacctcggtaactgacgccgacacggctgtttattattgtgcgagatcttcacgctccttcggtgactatggcgactggggccagggaaccctggtcaccgtctcctcag

SEQ ID NO: 9213 - DNA, 319 bp, Homo sapiens; identical to SEQ ID NO: 9199

SEQ ID NO: 9214 - DNA, 364 bp, Homo sapiens
gaggtgcagctgttggagtctgggggaggcttggtacagcctggggggtccctgagactctcctgtgcagcctctggattcagctttagcagttatgccatgagctgggtccgccaggctccagggaaggggctggagtgggtctcagcaattagtggcagtggtgatagtacatacgacgcagactatgtgaagggccggttcaccatctccagagacaattcgaagaacacgctgtatttggaaatgaacagcctgactgccgaggacacggccgtatattactgtgcgaaggactccgtgtttaactttggttcccgagatgaccactggggccagggaaccctggtcaccgtctcctcag

SEQ ID NO: 9215 - DNA, 322 bp, Homo sapiens
gaaattgtgttgacacagtctccagccaccctgtctctgtctccaggggaaagagccaccctcccctgcagggccagtcagagtgttggcagctccttagtctggtaccaacagaaacctggccaggctcccaggctcctcatctatgatgcatccaacagggccactggcatcccagccaggttcagtggcagtgggtctgggacagacttcactctcaccatcagcagcctagagcctgaagattttgcagtttattactgtcaccagcgttacaactggcctcgaacgttcggccaagggaccaaggtggaaatcaaac

SEQ ID NO: 9216 - DNA, 353 bp, Homo sapiens
aggtgcagctggtggagtctgggggaggcttggtcaagcctggagggtccctgagactctcctgtgcagcctctggattcaccttcgatgactactacatgagctgggtccgccaggctccagggaagggactggagtgggtctcatatattagcagtagcggtactatcatattctacgcagactctgtgaagggccgattcatcgtctccagggacaacgccaagaactccttgtttttagagatgaacagcctgagagacgaggacacgggccgatattactgtgcgagaagcacggtgattatgcccccggacgtctggggccaagggaccacggtcaccgtctcctca

SEQ ID NO: 9217 - DNA, 322 bp, Homo sapiens
gacatccagatgacccagtccccatcctccctgtctgcatctgtaggagacagagtcaccatcacttgccgggcgagtcaggacattagcaactatttgaattggtatcagcagaaaccagggaaagccccaaagctcctgatctacgctgcctccaacttacagacaggggtcccatcaaggttcagtggaagtggatttgggacagattttactttcaccatcagcagcctgcagcctgaagattttgctacatattactgtcaacaaaatcataatgtcctcttcaatttcggccctgggaccaaagtggatatcaaac

SEQ ID NO: 9218 - DNA, 346 bp, Homo sapiens
caggtgcagctgcaggagtcgggcccaggactggtgaagccttcggagaccctgtccctcacctgcactgtctctggtggctccatcagtagttactactggagctggatccggcagcccccagggaagggactggagtggattgggtatatctattacagtgggagcaccaactacaacccctccctcaagagtcgagtcaccatatcagtagacacgtccaagaaccagttctccctgaagctgagctctgtgaccgctgcggacacggccgtgtattactgtgcgagaggggggtcggggagttatgggtggggccagggaaccctggtcaccgtctcctcag

SEQ ID NO: 9219 - DNA, 322 bp, Homo sapiens
gacatccagatgacccagtctccatcctcactgtctgcatctgtaggagacagagtcaccatcacttgtcgggcgagtcagggcattagcaattatttagcctggtttcagcagaaaccagggaaagcccctaagtccctgatctatgctgcatccagtttgcaaagtggggtcccatcaaagttcagcggcagtggatctgggacagatttcactctcaccatcagcagcctgcagcctgaagattttgcaacttattactgccaacagtataatagttaccctcccacttttggccaggggaccaaggtggaaatcaaac

SEQ ID NO: 9220 - DNA, 372 bp, Homo sapiens
aggtgcagctggtgcagtctggggctgaggtgaagaagcctggggcctcagtgaaggtctcctgcaaggcttctggatacaccttcaccggctactatatgcactgggtgcgacaggcccctggacaagggcttgagtggatgggatggatcaaccctaacagtggtggcacaaactatgcacagaagtttcagggcagggtcaccatgaccagggacacgtccatcagcacagcctacatggagctgagcaggctgagatctgacgacacggccgtgtattactgtgcgagagccaactctgatcgttattactatgatagtagtggttatagctactggggccagggaaccctggtcaccgtctcctcag

SEQ ID NO: 9221 - DNA, 322 bp, Homo sapiens
gacatccagatgacccagtctccatcctccctgtctgcatctgtaggagacagagtcaccatcacttgccgggcaagtcagagcattagcagctatttaaattggtatcagcagaaaccagggaaagcccctaagctcctgatctatgctgcatccagtttgcaaagtggggtcccatcaaggttcagtggcagtggatctgggacagatttcactctcaccatcagcagtctgcaacctgaagattttgcaacttactactgtcaacagagttacagtacccccatcaccttcggccaagggacacgactggagattaaac

SEQ ID NO: 9222 - DNA, 367 bp, Homo sapiens
gtgcagctggtggagtctgggggaggcttggtacagcctggcaggtccctgagactctcctgtgcagcctctggattcacctttgatgattatgccatgcactgggtccggcaagctccagggaagggcctggagtgggtcgcaggtattagttggaatagtggtagcataggctatgcggactctgtgaagggccgattcaccatctccagagacaacgccaagaactccctgtttctgcaaatgaacagtctgagagctgaggacacggccttgtattcctgtgcaaaagcgggtatagcagcagctggtaccaattacgcttttgatatctggggccaagggacaatggtcaccgtctcttcag

SEQ ID NO: 9223 - DNA, 328 bp, Homo sapiens
gaaatagtgatgacgcagtctccagccaccctgtctgtgtctccaggggaaagagccaccctctcctgcagggccagtcagagtgttagcagcaacttggcctggtaccagcagaaacctggccaggctcccaggctcctcatctatggtgcatccaccagggccactggtatcccagccaggttcagtggcagtgggtctgggacagagttcactctcaccatcagcagcctgcagtctgaagattttgcagtttattactgtcagcagtataataactggcctcctccggtcaccttcggccaagggacacgactggagattaaac

SEQ ID NO: 9224 - DNA, 377 bp, Homo sapiens
aggtgcagctggtgcagtctggggctgaggtgaagaagcctgggtcctcggtgaaggtctcctgcaaggcttctggaggcaccttcagcagctatgctatcagctgggtgcgacaggcccctggacaaggtcttgagtggatgggagggatcatccctatctttggtacagcaaactacgcacagaagttccagggcagagtcacgattaccgcggacgaatccacgagcacagcctacatggagctgagcagcctgagatctgaggacacggccgtgtattactgtgcgagagtagtagatatagcagctcgtccggagggctactactactacatggacgtctggggcaaagggaccacggtcaccgtctcctca

SEQ ID NO: 9225 - DNA, 334 bp, Homo sapiens
gatattgtgatgactcagtctccactctccctgcccgtcacacctggagagccggcctccatctcctgcaggtctagtcagagcctcctgcatagtaatggatacaactatttggattggtacctgcagaagccagggcagtctccacagctcctgatctatttgggttctaatcgggcctccggggtccctgacaggttcagtggcagtggatcaggcacagattttacactgaaaatcagcagagtggaggctgaggatgttggggtttattactgcatgcaagctctacaaacgtggacgttcggccaagggaccaaggtggaaatcaaac

SEQ ID NO: 9226 - DNA, 373 bp, Homo sapiens
caggtgcagctggtggagtctgggggaggcgtggtccagcctgggaggtccctgagactctcctgtgcagcctctggattcaccttcagtagctatgctatgcactgggtccgccaggctccaggcaaggggctggagtgggtgacaattatatcatatgatggaagtaataaatactacgcagactccgtgaagggccgattcaccatctccagagacaattccaagaacacgctgtatctgcaaatgaacagcctgagagctgaggacacggctgtgtattactgtgcgaggggcctagggttggagtggaggttatcaccggggtactttgactactggggccagggaaccctggtcaccgtctcctcag

SEQ ID NO: 9227 - DNA, 322 bp, Homo sapiens
gaaatagtgatgacgcagtctccagccaccctgtctgtgtctccaggggaaagagccaccctctcctgcagggccagtcagagtgttagcagcaacttggcctggtaccagcagaaacctggccaggctcccaggctcctcatctatggtgcatccaccagggccactggtatcccagccaggttcagtggcagtgggtctgggacagagttcactctcaccatcagcagcctgcagtctgaagattttgcagtttattactgtcagcagtataataactggccggggactttcggccctgggaccaaagtggatatcaaac

SEQ ID NO: 9228 - DNA, 361 bp, Homo sapiens
caggtgcagctggtggagtctgggggaggcgtggtccagcctgggaggtccctgagactctcctgtgcagcctctggattcaccttcagtagctatggcatgcactgggtccgccaggctccaggcaaggggctggagtgggtggcagttatatcatatgatggaagtaataaatactatgcagactccgtgaagggccgattcaccatctccagagacaattccaagaacacgctgtatctgcaaatgaacagcctgagagctgaggacacggctgtatattactgtgcgaaagattcggaaggctacgagtactactttgactactggggccagggaaccctggtcaccgtctcctcag

SEQ ID NO: 9229 - DNA, 322 bp, Homo sapiens
gacatccagatgacccagtctccatcctccctgtctgcatctgtaggagacagagtcaccatcacttgccgggcaagtcagagcattagcagctctttaaattggtatcagcagaaaccagggaaagcccctaaactcctgatctatgctgcatccagtttgcaaagtggggtcccatcaaggttcagtggcagtggatctgggacagatttcactctcaccatcagcagtctgcaacctgaagattttgcaacttactactgtcaacagagttacagtactccgctcactttcggcggagggaccaaggtggagatcaaac

SEQ ID NO: 9230 - DNA, 366 bp, Homo sapiens
aggtgcagctggtggagtctgggggaggcttggtcaagcctggagggtccctgagactctcctgtgcagcctctggattcaccttcagtgactactacatgagctggatccgccaggctccagggaaggggctggagtgggtttcatacattagtagtagtggtagtaccatatactacgcagactctgtgaagggccgattcaccatctccagggacaacgccaagaactcactgtatctgcaaatgaacagcctgagagccgaggacacggccgtgtattactgtgcgagagatggggatagcagtggctggtacgccagatttgactactggggccagggaaccctggtcaccgtctcctcag

SEQ ID NO: 9231 - DNA, 325 bp, Homo sapiens
gaaatagtgatgacgcagtctccagccaccctgtctgtgtctccaggggaaagagccaccctctcctgcagggccagtcagagtgttagcagcaacttggcctggtaccagcagaaacctggccaggctcccaggctcctcatctatggtgcatccaccagggccactggtatcccagccaggttcagtggcagtgggtctgggacagagttcactctcaccatcagcagcctgcagtctgaagattttgcagtttattactgtcagcagtataataactggcctccgtggacgttcggccaagggaccaaggtggaaatcaaac

SEQ ID NO: 9232 - DNA, 371 bp, Homo sapiens
aggtgcagctggtgcagtctggggctgaggtgaagaagcctgggtcctcggtgaaggtctcctgcaaggcttctggaggcaccttcagcagctatgctatcagctgggtgcgacaggcccctggacaagggcttgagtggatgggagggatcatccctatgtttggtgcagcaaactacgcacagaagttccagggcagagtcacgattaccgcggacgaatccacgagcacagcctacatggagctgagcagcctgagatctgaggacacggccgtgtattactgtgcgagagcccggacggtcgggttcggggagtccgcctactacatggacgtctggggcaaagggaccacggtcaccgtctcctca

SEQ ID NO: 9233 - DNA, 334 bp, Homo sapiens
gatattgtgatgactcagtctccactctccctgcccgtcacccctggagagccggcctccatctcctgcaggtctagtcagagcctcctgcatagtaatggatacaactatttggattggtacctgcagaagccagggcagtctccacagctcctgatctatttgggttctaatcgggcctccggggtccctgacaggttcagtggcagtggatcaggcacagattttacactgaaaatcagcagagtggaggctgaggatgttggggtttattactgcatgcaagctctacacccgtgcagttttggccaggggaccaaggtggagatcaaac

SEQ ID NO: 9234 - DNA, 372 bp, Homo sapiens
gaggtgcagctggtggagtctgggggaggcttggtaaagcctggggggtcccttagactctcctgtgcagcctctggattcactttcagtaacgcctggatgagctgggtccgccaggctccagggaaggggctggagtgggttggccgtattaaaagcaaaactgatggtgggacaacagactacgctgcacccgtgaaaggcagattcaccatctcaagagatgattcaaaaaacacgctgtatctgcaaatgaacagcctgaaaaccgaggacacagccgtgtattactgtaccacagatagatggggttcttcatactactactacatggacgtctggggcaaagggaccacggtcaccgtctcctca

SEQ ID NO: 9235 - DNA, 337 bp, Homo sapiens
gatattgtgatgactcagtctccactctccctgcccgtcacccctggagagccggcctccatctcctgcaggtctagtcagagcctcctgcatagtaatggatacaactatttggattggtacctgcagaagccagggcagtctccacagctcctgatctatttgggttctaatcgggcctccggggtccctgacaggttcagtggcagtggatcaggcacagattttacactgaaaatcagcagagtggaggctgaggatgttggggtttattactgcatgcaagctctacaaactacgtggacgttcggccaagggaccaaggtggaaatcaaac

SEQ ID NO: 9236 - DNA, 367 bp, Homo sapiens
gaggtgcagctggtggagtctgggggaggcttggtccagcctggggggtccctgagactctcctgtgcagcctctggattcacctttagtagctattggatgagctgggtccgccaggctccggggaaggggctggagtgggtggcctacataaagcaagatggaagtgagaaatactatgtggactctgtgaagggccgattcaccatctccagagacaacgccaagaactcactgtatctgcaaatgaacagcctgagagccgaggacacggccgtgtattactgtgcgagagatgccgatagcagtggctggtacgcccactttgactactggggccagggaaccctggtcaccgtctcctcag

SEQ ID NO: 9237 - DNA, 325 bp, Homo sapiens
gaaatagtgatgacgcagtctccagccaccctgtctgtgtctccaggggaaagagccaccctctcctgcagggccagtcagagtgttagcagcaacttagcctggtaccagcagaaacctggccaggctcccaggctcctcatctatggtgcatccaccagggccactggtatcccagccaggttcagtggcagtgggtctgggacagagttcactctcaccatcagcagcctgcagtctgaagattttgcagtttattactgtcagcagtataataactggcctccgtggacgttcggccaagggaccaaggtggaaatcaaac

SEQ ID NO: 9238 - DNA, 373 bp, Homo sapiens
caggtgcagctgcaggagtcgggcccaggactggtgaagccttcacagaccctgtccctcacctgcactgtctctggtggctccatcagcagtggtggttactactggagctggatccgccagcacccagggaagggcctggagtggattgggtacatctattacagtgggagcacctactacaacccgtccctcaagagtcgagttaccatatcagtagacacgtctaagaaccagttctccctgaagctgagctctgtgactgccgcggacacggccgtgtattactgtgcgagaaatccggacgtatacgattttggctcaaactggttcgacccctggggccagggaaccctggtcaccgtctcctcag

SEQ ID NO: 9239 - DNA, 379 bp, Homo sapiens
caggtgcagctgcaggagtcgggcccaggactggtgaagccttcacagaccctgtccctcacctgcactgtctctggtggctccatcagcagtggtggttactactggagctggatccgccagcacccagggaagggcctggagtggattgggtacatctattacagtgggagcacctactacaacccgtccctcaagagtcgagttaccatatcagtagacacgtctaagaaccagttctccctgaagctgagctctgtgactgccgcggacacggccgtgtattactgtgcgagagctcctgacgatttttggagtggttattgggggtactactttgactactggggccagggaaccctggtcaccgtctcctcag

SEQ ID NO: 9240 - DNA, 368 bp, Homo sapiens
aggtgcagctggtgcagtctggggctgaggtgaagaagcctggggcctcagtgaaggtctcctgcaaggcttctggatacaccttcaccggctactatatgcactgggtgcgacaggcccctggacaagggcttgagtggatgggatggatcaaccctaacagtggtggcacaaactatgcacagaagtttcagggcagggtcaccatgaccagggacacgtccatcagcacagcctacatggagctgagcaggctgagatctgacgacacggccgtgtattactgtgcgagaggcctccatagcagctctgactactactacggtatggacgtctggggccaagggaccacggtcaccgtctcctca

SEQ ID NO: 9241 - DNA, 322 bp, Homo sapiens
gacatccagatgacccagtctccatcctccctgtctgcatctgtaggagacagagtcaccatcacttgccgggcgagtcagggcattagcaattatttagcctggtatcagcagaaaccagggaaagttcctaagctcctgatctatgctgcatccactttgcaatcaggggtcccatctcggttcagtggcagtggatctgggacagatttcactctcaccatcagcagcctgcagcctgaagatgttgcaacttattactgtcaaaagtataacagtgccccattcaccttcggccaagggacacgactggagattaaac

SEQ ID NO: 9242 - DNA, 358 bp, Homo sapiens
gaggtgcagctggtggagtctgggggagacttggtggagcctggggggtcccttagactctcctgtgcagcctctggattcaatttcaatatcgcctggatgaactgggtccgccaggctccagggaagggcctggagtgggttggccgtattaaaagcaatactgacggtgggacaacagactacgctgcacccgtgaaaggcagattcaccatctcaagagatgattcaaaatacacgctgtttttgcagatgaacaggctgcagaccgaggacacagccgtctattattgtaccacagacccatatccgacctttggctactggggccagggaaccctggtcaccgtctcctcag

SEQ ID NO: 9243 - DNA, 322 bp, Homo sapiens
gacatccagatgacccagtctccttccaccctgtctgcatctgtaggagacagagtcaccatcacttgccgggccaatcagactattagtacctggttggcctggtatcagcagaaaccagggaaagcccctaagctcctaatctataaggcgtctaattttgcaagtggggtcccatcaaggttcagcggcagtggatctgggacagaattcactctcaccatcagcagcctgcagcctgacgattttgcaagttattactgccaacagtataatagttattggtggacgttcggccaagggaccaaggtggaaatcaaac

SEQ ID NO: 9244 - DNA, 373 bp, Homo sapiens
caggtgcagctggtggagtctgggggaggcgtggtccagcctgggaggtccctgagactctcctgtgcagcctctggattcaccttcagtagctatggcatacactgggtccgccaggctccaggcaaggggctggagtgggtggcagttatatcatatgatggaagtaataaatactatgcagactccgtgaagggccgattcaccatctccagagacaattccaagaacacgctgtatctgcaaatgaacagcctgagagctgaggacacggctatgtattactgtgcgaaagactacacgccttacgctttggagtggttaccattatttgactactggggccagggaaccctggtcaccgtctcctcag

SEQ ID NO: 9245 - DNA, 325 bp, Homo sapiens
gaaatagtgatgacgcagtctccagccaccctgtctgtgtctccaggggaaagagccgccctctcctgcagggccagtcagagtgttagcaggaacctagcctggtaccagcagaaacctggccaggctcccaggctcctcatctatggtgcatccaccagggccactggtatcccagccaggttcagtggcagtgggtctgggacagagttcactctcaccatcagcagcctgcagtctgaagattttgcagtttattactgtcagcagtataataagtggcctccgctcactttcggcggagggaccaaggtggagatcaaac

SEQ ID NO: 9246 - DNA, 322 bp, Homo sapiens
gacatccagatgacccagtctccatcctccctgtctgcatctgtaggagacagagtcaccatcacttgccaggcgagtcaggacattagcaactatttaaattggtatcagcagaaaccagggaaagcccctaagctcctgatctacgatgcatccaatttggaaacaggggtcccatcaaggttcagtggaagtggatctgggacagattttactttcaccatcagcagcctgcagcctgaagatattgcaacatattactgtcaacagtatgataatctcccgctcactttcggcggagggaccaaggtggagatcaaac

SEQ ID NO: 9247 - DNA, 322 bp, Homo sapiens
gaaattgtgttgacgcagtctccaggcaccctgtctttgtctccaggggaaagagccaccctctcctgcagggccagtcagagtgttagcagcagctacttagcctggtaccagcagaaacctggccaggctcccaggctcctcatctatggtgcatccagcagggccactggcatcccagacaggttcagtggcagtgggtctgggacagacttcactctcaccatcagcagactggagcctgaagattttgcagtgtattactgtcagcagtatggtagctcagggacgttcggccaagggaccaaggtggaaatcaaac

SEQ ID NO: 9248 - DNA, 352 bp, Homo sapiens; identical to SEQ ID NO: 4853

SEQ ID NO: 9249 - DNA, 381 bp, Homo sapiens; identical to SEQ ID NO: 9170

SEQ ID NO: 9250 - DNA, 351 bp, Homo sapiens; identical to SEQ ID NO: 9172

SEQ ID NO: 9251 - DNA, 355 bp, Homo sapiens; identical to SEQ ID NO: 9174

SEQ ID NO: 9252 - DNA, 388 bp, Homo sapiens; identical to SEQ ID NO: 9176

SEQ ID NO: 9253 - DNA, 352 bp, Homo sapiens; identical to SEQ ID NO: 9178

SEQ ID NO: 9254 - DNA, 352 bp, Homo sapiens; identical to SEQ ID NO: 9180

SEQ ID NO: 9255 - DNA, 366 bp, Homo sapiens; identical to SEQ ID NO: 9182

SEQ ID NO: 9256 - DNA, 358 bp, Homo sapiens; identical to SEQ ID NO: 9184

SEQ ID NO: 9257 - DNA, 376 bp, Homo sapiens; identical to SEQ ID NO: 9186

SEQ ID NO: 9258 - DNA, 374 bp, Homo sapiens; identical to SEQ ID NO: 9188

SEQ ID NO: 9259 - DNA, 370 bp, Homo sapiens; identical to SEQ ID NO: 9190

SEQ ID NO: 9260 - DNA, 352 bp, Homo sapiens; identical to SEQ ID NO: 9192

SEQ ID NO: 9261 - DNA, 362 bp, Homo sapiens; identical to SEQ ID NO: 9194

SEQ ID NO: 9262 - DNA, 367 bp, Homo sapiens; identical to SEQ ID NO: 9196

SEQ ID NO: 9263 - DNA, 349 bp, Homo sapiens; identical to SEQ ID NO: 9198

SEQ ID NO: 9264 - DNA, 382 bp, Homo sapiens; identical to SEQ ID NO: 9200

SEQ ID NO: 9265 - DNA, 395 bp, Homo sapiens; identical to SEQ ID NO: 9202

SEQ ID NO: 9266 - DNA, 393 bp, Homo sapiens; identical to SEQ ID NO: 9204

SEQ ID NO: 9267 - DNA, 367 bp, Homo sapiens; identical to SEQ ID NO: 9206

SEQ ID NO: 9268 - DNA, 380 bp, Homo sapiens; identical to SEQ ID NO: 9208

SEQ ID NO: 9269 - DNA, 364 bp, Homo sapiens; identical to SEQ ID NO: 9210

SEQ ID NO: 9270 - DNA, 357 bp, Homo sapiens; identical to SEQ ID NO: 9212

SEQ ID NO: 9271 - DNA, 364 bp, Homo sapiens; identical to SEQ ID NO: 9214

SEQ ID NO: 9272 - DNA, 353 bp, Homo sapiens; identical to SEQ ID NO: 9216

SEQ ID NO: 9273 - DNA, 346 bp, Homo sapiens; identical to SEQ ID NO: 9218

SEQ ID NO: 9274 - DNA, 372 bp, Homo sapiens; identical to SEQ ID NO: 9220

SEQ ID NO: 9275 - DNA, 367 bp, Homo sapiens; identical to SEQ ID NO: 9222

SEQ ID NO: 9276 - DNA, 377 bp, Homo sapiens; identical to SEQ ID NO: 9224

SEQ ID NO: 9277 - DNA, 373 bp, Homo sapiens; identical to SEQ ID NO: 9226

SEQ ID NO: 9278 - DNA, 361 bp, Homo sapiens; identical to SEQ ID NO: 9228

SEQ ID NO: 9279 - DNA, 366 bp, Homo sapiens; identical to SEQ ID NO: 9230

SEQ ID NO: 9280 - DNA, 371 bp, Homo sapiens; identical to SEQ ID NO: 9232

SEQ ID NO: 9281 - DNA, 372 bp, Homo sapiens; identical to SEQ ID NO: 9234

SEQ ID NO: 9282 - DNA, 367 bp, Homo sapiens; identical to SEQ ID NO: 9236

SEQ ID NO: 9283 - DNA, 373 bp, Homo sapiens; identical to SEQ ID NO: 9238

SEQ ID NO: 9284 - DNA, 379 bp, Homo sapiens; identical to SEQ ID NO: 9239

SEQ ID NO: 9285 - DNA, 368 bp, Homo sapiens; identical to SEQ ID NO: 9240

SEQ ID NO: 9286 - DNA, 358 bp, Homo sapiens; identical to SEQ ID NO: 9242

SEQ ID NO: 9287 - DNA, 373 bp, Homo sapiens; identical to SEQ ID NO: 9244

SEQ ID NO: 9288 - DNA, 333 bp, Homo sapiens; identical to SEQ ID NO: 9169

SEQ ID NO: 9289 - DNA, 340 bp, Homo sapiens; identical to SEQ ID NO: 9171

SEQ ID NO: 9290 - DNA, 328 bp, Homo sapiens; identical to SEQ ID NO: 9173

SEQ ID NO: 9291 - DNA, 333 bp, Homo sapiens; identical to SEQ ID NO: 9175

SEQ ID NO: 9292 - DNA, 328 bp, Homo sapiens; identical to SEQ ID NO: 9177

SEQ ID NO: 9293 - DNA, 322 bp, Homo sapiens; identical to SEQ ID NO: 9179

SEQ ID NO: 9294 - DNA, 340 bp, Homo sapiens; identical to SEQ ID NO: 9181

SEQ ID NO: 9295 - DNA, 337 bp, Homo sapiens; identical to SEQ ID NO: 9183

SEQ ID NO: 9296 - DNA, 322 bp, Homo sapiens; identical to SEQ ID NO: 9185

SEQ ID NO: 9297 - DNA, 322 bp, Homo sapiens; identical to SEQ ID NO: 9187

SEQ ID NO: 9298 - DNA, 328 bp, Homo sapiens; identical to SEQ ID NO: 9189

SEQ ID NO: 9299 - DNA, 322 bp, Homo sapiens; identical to SEQ ID NO: 9191

SEQ ID NO: 9300 - DNA, 336 bp, Homo sapiens; identical to SEQ ID NO: 9193

SEQ ID NO: 9301 - DNA, 337 bp, Homo sapiens; identical to SEQ ID NO: 9195

SEQ ID NO: 9302 - DNA, 322 bp, Homo sapiens; identical to SEQ ID NO: 9197

SEQ ID NO: 9303 - DNA, 319 bp, Homo sapiens; identical to SEQ ID NO: 9199

SEQ ID NO: 9304 - DNA, 319 bp, Homo sapiens; identical to SEQ ID NO: 9201

SEQ ID NO: 9305 - DNA, 322 bp, Homo sapiens; identical to SEQ ID NO: 9203

SEQ ID NO: 9306 - DNA, 328 bp, Homo sapiens; identical to SEQ ID NO: 9205

SEQ ID NO: 9307 - DNA, 319 bp, Homo sapiens; identical to SEQ ID NO: 9207

SEQ ID NO: 9308 - DNA, 322 bp, Homo sapiens; identical to SEQ ID NO: 9209

SEQ ID NO: 9309 - DNA, 322 bp, Homo sapiens; identical to SEQ ID NO: 9211

SEQ ID NO: 9310 - DNA, 319 bp, Homo sapiens; identical to SEQ ID NO: 9199

SEQ ID NO: 9311 - DNA, 322 bp, Homo sapiens; identical to SEQ ID NO: 9215

SEQ ID NO: 9312 - DNA, 322 bp, Homo sapiens; identical to SEQ ID NO: 9217

SEQ ID NO: 9313 - DNA, 322 bp, Homo sapiens; identical to SEQ ID NO: 9219

SEQ ID NO: 9314 - DNA, 322 bp, Homo sapiens; identical to SEQ ID NO: 9221

SEQ ID NO: 9315 - DNA, 328 bp, Homo sapiens; identical to SEQ ID NO: 9223

SEQ ID NO: 9316 - DNA, 334 bp, Homo sapiens; identical to SEQ ID NO: 9225

SEQ ID NO: 9317 - DNA, 322 bp, Homo sapiens; identical to SEQ ID NO: 9227

SEQ ID NO: 9318 - DNA, 322 bp, Homo sapiens; identical to SEQ ID NO: 9229

SEQ ID NO: 9319 - DNA, 325 bp, Homo sapiens; identical to SEQ ID NO: 9231

SEQ ID NO: 9320 - DNA, 334 bp, Homo sapiens; identical to SEQ ID NO: 9233

SEQ ID NO: 9321 - DNA, 337 bp, Homo sapiens; identical to SEQ ID NO: 9235

SEQ ID NO: 9322 - DNA, 325 bp, Homo sapiens; identical to SEQ ID NO: 9237

SEQ ID NO: 9323 - DNA, 322 bp, Homo sapiens; identical to SEQ ID NO: 9241

SEQ ID NO: 9324 - DNA, 322 bp, Homo sapiens; identical to SEQ ID NO: 9243

SEQ ID NO: 9325 - DNA, 325 bp, Homo sapiens; identical to SEQ ID NO: 9245

SEQ ID NO: 9326 - DNA, 322 bp, Homo sapiens; identical to SEQ ID NO: 9246

SEQ ID NO: 9327 - DNA, 322 bp, Homo sapiens; identical to SEQ ID NO: 9247

SEQ ID NO: 9328 - DNA, 296 bp, Homo sapiens; identical to SEQ ID NO: 5265

SEQ ID NO: 9329 - DNA, 297 bp, Homo sapiens
ttgtgatgactcagtctccactctccctgcccgtcacccttggacagccggcctccatctcctgcaggtctagtcaaggcctcgtgtccagtgatggaaccacctacttgagttggtatcagcagaggccaggccaatctccgaggcgcctattttataaggtttctgagcgggactctggggtcccagacagattcagcggcagtgggtcaggcactgatttcaccctgaaaatcagcagggtggaggctgaggatgttggggtttattactgcttgcaaggtacacactggcctc

SEQ ID NO: 9330 - DNA, 302 bp, Homo sapiens
gaggtgcagctggtggagtctgggggaggcttggtccagcctggagggtccctgaaactctcctgtgcagcttctggattcagattcagtgaccactacatgaactgggtccgccaggctccagggaagggactggagtggattggccgtattagaaacaaagctaacagttttatcacagaatacgccgcgtctgtgaaagacagattcagcatctcaagagatgactcaaagaattcactgtatctgcaaatgcacagcctgaagagcgaggacacggccatgtatttttgtactagaga

SEQ ID NO: 9331 - DNA, 305 bp, Homo sapiens
gacatcgtgatgacccagtctccagacttcctggctgtgtctctgggcgagagggccaccatcaactgcaagtccagccagaatgttttatacaactccaacaataagaactacttagcttggtaccagcagataccagggcagcctcctaagttggtcatttactgggcatctacccgcgaatccggggtccctgaccgattcagtggcaacgggtctgggacagatttcactctcaccatcagcagcctgcaggctgaagatgtggccgtttattactgtcagcagtattatactactcctcc

SEQ ID NO: 9332 - DNA, 294 bp, Homo sapiens
tgcagctgcaggagtccggctcaggactggtgaggccctcacagaccctgtccctcacgtgcgctgtctctggtgtctccatcagtagtggcacttactcctggtgctggatccggcagccaccgggggagggcctgcagtggattgggtacatgtctcatagtgggcggacctacaataatccgtcactcaagagtcgagtcatcatgtcagtagataggtccaagaaccagctctccctgatgttgacttctgtgaccgccgcagacacggccgtgtatttctgcgccagag

SEQ ID NO: 9333 - DNA, 287 bp, Homo sapiens
gacatccagatgacccagtctccatcctccctgtctgcatctgtgggagacagagtcaccatcacttgccaggcgagtcaggacattagcaactctttaaattggtatcagcaaaaaccagggaaagcccctaaactcctgatctacgatgcatccaatttggaaacgggggtcccatcaaggttcagtggaagtggatctgggacacatttcactttcaccatcagcagcctgcagccagaagatattggaacatattactgtcaacagtatgataatctgcctcc

SEQ ID NO: 9334 - DNA, 296 bp, Homo sapiens
gaggtgcagctggtggagtctgggggaggctcggtccagcctggggggtccctgagactttcctgtgtagcctctggattcacctttagtaacttttggatgagttgggtccgccaggctccagggaaggggctggagtgggtggccaacatcaggcaagatgggggtgagagatattatgtgggctctgcgaggggccgattcaccatcgccagagacaacgccaacaactcactatatctccaaatgaacagcctgagagtcgaggacacggctgtttattattgtacgagaga

SEQ ID NO: 9335 - DNA, 298 bp, Homo sapiens
ttgtgatgactcagtctccactctccctgcccgtcacccttggacagccggcctccatctcctgtaggtctagtcaaagcctcgtatacagtgatggaaacacctacttgaattggtttcagcagaggccaggccaatctccaaggcgcctaatttatagggtttctaagcgggactctggggtcccagacagattcagcggcagtgggtcaggctctgatttcacactgaaaatcagcagggtggaggctgaggatgttggggtttattactgcatgcaaggtacacactggcctcc

SEQ ID NO: 9336 - DNA, 294 bp, Homo sapiens
gaggtgcagctgttggagtctgggggaggcttggcacagcctggggggtccctcagactctcctgtgcagcctctggattcacctttagcggctatgccatgacctgggtccgccaggctccagggaaggggctggagtgggtctcaggtcttagccgcgatggtgctgacacatcctacgcagactccgtgaagggtcgattaatcatctccagagacaattccaagaacacgctgtatctgcaaatccacaacctgaaagccgaagacacggccgtatattactgtgcgaaa

SEQ ID NO: 9337 - DNA, 287 bp, Homo sapiens
gaaattgtgttgacacagtctccagccaccctgtctttgtctccaggggaaagagccaccctctcctgcagggccagtcagagtgttagtaggtccttagcctggtaccaacagaaacctggccaggctcccaggctcctcatctatggtgcatccaacagggtcactggcatcccagccaggttcagtggcagtgggtctgggacagacttcactctcaccatcagcagcctagagcctgaagattttgcattttattactgtcagcagcggagtaactggccccc

SEQ ID NO: 9338 - DNA, 294 bp, Homo sapiens
gaggtgcagctggtggagtctgggggaggcttggtccagcctggggggtccctgagcctctcctgtgcagcctctggattcacctttagtaatttttggatgagctgggtccgccaggctccagggaaggggctggagtgggtggccaacataaagcaagatggaagtgagaagtactatgtggactctgtgaggggccgattcaccttctccagagacaacgccaacaactcgctacttctgcagatgaacagcctgagagccgacgacacggctgtttattactgtgcgaga

SEQ ID NO: 9339 - DNA, 286 bp, Homo sapiens
gaaattgtgttgacacagtctccacccaccctgtctttgtctccaggggaaggagccaccctctcctgcagggccagtcagagtgttagcggctccttagcctggtaccaacagaaacctggccaggctcccagactcctcatctatgatacatccaagagggccactggcatcccagccaggttcagtggcagtgggtctgggacagacttcactctcaccatcagcagcctagagcctgaagattttgcagtttattactgtcagcagcgtagcaactggcctc

SEQ ID NO: 9340 - DNA, 296 bp, Homo sapiens
gaggtgcagctggtggagtctgggggaggcttggtgcagcctggggggtccctgagactctcctgcgcagcctctggattcacttttagtagccattggatggcctgggtccgccaggctccagggaaggggctggagtgggtggccaatataaagaaggatggaagtgagacaaactatgtggactctgtgaagggccgattcaccatctccagagacaacgccaagaacgcactttatctgcaaatgaatagcctgagagtcgaggacacggcggtgtattactgtgcgaaaga

SEQ ID NO: 9341 - DNA, 303 bp, Homo sapiens
gacatcgtgatgacccagtctccagactccctggctgtgtctctgggcgagagggccaccatcaattgcaagtccagccggagtcttttaagcagctccaacaacaagaactacttagcttggtaccagcagaaatcaggacagcctcctagactgctcatgttctgggcatctgcgcgggaatccggtgtccctgaccgattcagtggcagcgggtctgggacagatttcactctcaccatcagcagcctgcaggctgaggatgtggcagtttattactgtcagcattattatactgaacct

SEQ ID NO: 9342 - DNA, 293 bp, Homo sapiens
aggtgcagctggtgcagtctgggcctgaggtgaagaagtctggggcctcagtgaagatttcctgcaaggcttctggatacaccttcagtaactatgctgtacattgggtgcgccaggcccccggacaaaggcctgagtggatggggtggagcaacgctggcagtggtgccacaaaatattcacagaatttccagggcagactcaccattgtcagggacacatccgcgaacacagtcttcatggagctgagcagcctgacatctgaggacacggctgtatattactgtgcgaga

SEQ ID NO: 9343 - DNA, 299 bp, Homo sapiens
gacatcgtgatgacccagtctccagactccctggctgtgtctctgggcgagagggccaccatcaactgcaagtccagccagagtgttttttacaggtccaccaataagaactacttagcttggtaccagcagaaaccaggacagcctcctaagttgctcattcactgggcatctacccgggaatccggggtccctgaccgattcagtggcagcgggtctgggacagatttcactctcaccatcagcagcctgcaggctgaagatgtggcagtttattactgtcagcaatattataatac

SEQ ID NO: 9344 - DNA, 291 bp, Homo sapiens
gtgcagctggtgcagtctggagcagaggtgaaaaagcccggggagtctctgaggatctcctgtaaggcttctggctacacctttaccacctactatatcacctgggtgcgccagatgaccgggaaaggcctggagtggatggggaggattgatcctcgtgactcttatagcaactacaacccgtccttcgaaggccacgtcactatgtcagttgacaagtccatcactactgcctacctgcagtggagtggcctgaaggcctcggacaccgccatttattactgtgcgaga

SEQ ID NO: 9345 - DNA, 282 bp, Homo sapiens
gacatccagatgacccagtctccttccaccctgtctgcatctgtaggagacagagtcaccatcacttgccgggccagtcagagtattagtagctggttggcctggtatcagcagaaaccagggaaagcccctaagctcctgatctataaggcgtctagtttagaaagtggggtcccatcaaggttcagcggcagtggatctgggacagaattcactctcaccatcagcagcctgcagcctgatgattttgcaacttattactgccaacagtataatagttat

SEQ ID NO: 9346 - DNA, 289 bp, Homo sapiens
caggtgcagctgcaggagtcgggcccaggactggtgaagccttcggagaccctgtccctcacctgctctgtctctggtgactccatgagtactttctactggagctggatccggcagcccccagggaagggactggagtggattgggtttatgcaccatagtgggagtgccggctacaatccctccctcaagagtcgagtcgccttttcagtagacacgtccaagaatcagttctccctgagattgacctctgtgaccgctgcggacacggccatatattattgtgcga

SEQ ID NO: 9347 - DNA, 282 bp, Homo sapiens
gacatccagatgacccagtctccttccacactgtctgcatctgtaggagacagagtcactattacttgtcgggccagtcaggatatcggtaactggttggcctggtatcaacagaagccagggaaagcccctagcctcctcatctatgatgtttccactttgcaaagtggggtcccatcaaggttcagcggccgtagatctgggacagaattcactctcaccatcagcagcctgcagcctgatgatcttgcaacttattactgccaacagtataatagttat

SEQ ID NO: 9348 - DNA, 293 bp, Homo sapiens
aggtgcagctggtgcagtctggggctgaggtgaagaagcctgggtcctccgtgaaggtctcctgcagggcgtctggaggcaccttcagcagctttgctgtcagctgggtgcgacaggcccctggacaaggacttgaatggatgggagggatcatcggtatgtttgggacaacaaaatacgcacagaggttcctgggcagagtcacgattaccgcggacgagtctacgagctcagcctacatggagctgagcagcctgacatctgaggacacggccgtgtattattgtgcgaga

SEQ ID NO: 9349 - DNA, 290 bp, Homo sapiens
gaaattgtgttgacgcagtctccaggcaccctgtctttgtctccaggggaaagagccaccctctcctgcagggccagtcagagtgttagcagcagctacttagcctggtaccagcagaaacctggccaggctcccaggctcctcatctatggtacatccagcagggccactggcatcccagacaggttcagtggcagtgggtctgggacagacttcactctcaccatcagcagactggagcctgaagattttgcagtttattactgtcagcagtatggtagctcacctcc

SEQ ID NO: 9350 - DNA, 296 bp, Homo sapiens
gaggtgcagctggtggagtctgggggaggcttggtccagcctgacgggtccctgagactctcctgtgtagcctctggattcacctttaattactattggatgatgtgggtccgccaggctccagggaaggggctggagtgggtggccaacataaaccgagatggaagtgagaaaaactatgtggactctgtgaagggccgattctccatctccagagacagcgtcaggaactcattgtatctgcaaatgaacagcctgagagccgaggacacggctgtctattactgtgcgacaga

SEQ ID NO: 9351 - DNA, 284 bp, Homo sapiens
gacatccagatgacccagtctccatcctcactgtctgcatctgtaggagacagagttaccatcacttgtcgggcgagccagggcattaacaatgatgtagcctggtttcagcagaaaccagggaaagcccctaagtccctgatcaatgctgcatccagtttgcagagtggagtcccatcaaagttcagcggcagtggatctgggacagacttcactctcaccatcagcaacctgcagcctgaagattttgcaacttattactgccaacagtataatagttaccc

SEQ ID NO: 9352 - DNA, 295 bp, Homo sapiens
gaggtgcagctggtggagtctgggggaggcttggtaaagcctggggggtcccttagactctcctgtgcagtctctggattcactttcagtaacgcctggatgagctgggtccgccaggctccagggaaggggctggagtgggttggccgttttaaaagcaaaagtggtggtgggacaacagactacgctgcacccgtgaagggcagatttaccatctcgagagatgattcaaagaacacgctgcatctacaaatgaacagtctgaaaaccgaggacacagccgtgtattactgta

SEQ ID NO: 9353 - DNA, 298 bp, Homo sapiens
ttgtgatgactcagtctccactctccctgcccgtcacccttggacagccggcctccatctcctgcaggtctagtcaaagcctcgtatacagtgatggaaacacctacttgaattggtttcagcagaggccaggccaatctccaaggcgcctaatttatatggtttctaaccgggactccggggtcccagacagattcagcggcagtgggtcaggcactgatttcacactgaaaatcagcagggtggaggctgaggatgttggggtttattactgcatgcagactgcactctggcctcc

SEQ ID NO: 9354 - DNA, 290 bp, Homo sapiens
tgcagctggtgcagtctgggcctgaggtgaagaagcctgggacctcagtgaaggtctcctgcaaggcttctggatccacctttagtagctctgctgtgcagtgggtgcgacaggctcgtggacaacgccctgagtggataggatggatcgtcgttggtagtggtaacacaaattacgcacagaacttccaagacagagtcaccattaccagggacatgtccacaagcacagcctacatggagctgagcagcctgagatccgaggacacggccgtatattactgtgcggca

SEQ ID NO: 9355 - DNA, 301 bp, Homo sapiens
gatattgtgatgactcagtctccactctccctgcccgtcacccctggagagccggcctccatctcctgcaggtctagtcagagcctcctgcataataatggatacaactatttggattggtacctgcagaagccagggcagtctccacacctcctgatctatttgggttctaatcgggcctccggggtccctgacaggttcagtggcagtggatcaggcacagattttacactggaaattagcagagtggaggctgaggatgttggggtctattactgcatgcaagcttcacaaactcctc

SEQ ID NO: 9356 - DNA, 293 bp, Homo sapiens
gaggtgcagctggtgcagtctggcgcagaggtgaaaaagcccggggagtctctgaagatctcctgtaagggttctggatacagctttacgagctactggatcgcctgggtgcgccagatgcccgggaaaggcctggagtggatggggaccatccatcctggtgactctgataccacatacggcccgtccttccaaggccaggtcgccatctcagccgacaggtccatcagcaccgcctttctggagtggggcagtctgaaggcctcggacaccgccatgtattactgtgcgag

SEQ ID NO: 9357 - DNA, 284 bp, Homo sapiens
gacatccagttgacccagtctccatccttcttgtctgcatctgtcggagacagagtcaccatcacttgcagggccagtcagggcattagcagttatttagcctggtatcagcaaaaaccagggaaagcccctaagctcctgatctatgctgcatccactttgcaaagtggggtcccagcgaggttcagcggcagtggatcggggacagaattcactctcacaatcagccgcctgcagcctgaagattttgcaactttttactgtcaacagcttcatagttcccc

SEQ ID NO: 9358 - DNA, 296 bp, Homo sapiens
gaggtgcagctggtggagtctgggggaggtctggtccagcctggggggtccctgagactctcctgtgcagcctctggattcacatttagtaggttttggatgagttgggtccgccaggctccagggaaggggctggagtgggtggccaacataaaccaagatggaagtgagaaaaactatgtggactctgtggagggccgattcaccatctctagagacaacgccaagaactcactatatttgcaaatgaacagcctgagagccgaagacacggctgtgtatcactgtgcgccaga

SEQ ID NO: 9359 - DNA, 275 bp, Homo sapiens
gaaattgtgttgacacagtctccagccaccctggttttgtctccaggggaaagagccaccctctcctgcagggccagtcactttgttaacaccttcttagcctggtatcaacagaaacctggccagtctcccaggctcctcatctctgatgcaaccatcagggccactggcatcccagccaggttcagtggcagtgggtctgggacagacttcactctcaccatcagcagcctagagcctgaagattgtgcagtttactactgtcagcagcgtag

SEQ ID NO: 9360 - DNA, 295 bp, Homo sapiens
gtgcagctggtggagtctgggggaggcttggcacagcctggcgggtccctgagactctcctgtgcagcctctggattcaactttggttattataacatgcactggatccggcaagttccagggaagggcctggagtgggtctcaggtattagttggaatagtgttcacatagcctatgcggactctgtaaagggccgattcaccatctccagagacaatgccaaggactccctgtatctgcagatgaacagtctgagacctgacgacacggccttgtatttctgtgcaaaagata

SEQ ID NO: 9361 - DNA, 282 bp, Homo sapiens
gacatccagatgacccagtctccttccaccctgtctgcatctgtaggagacgtagtcaccatcacttgccgggccagtcagagtattagtagttggttggcctggtttcagcagagacccgggaaagcccctaagcccctgatctatagggcgtctcgtttacagagtggggtcccatcaaggttcagcggcagtggatctgggacagaattcactctcaccatcagcagcctgcagcctgatgattttgcaacttattactgccaacaatatgatacttat

SEQ ID NO: 9362 - DNA, 294 bp, Homo sapiens
aggtgcagctggtgcagtctggggctgaggtgaagaagcctggggcctcagtgagggtctcctgtacggcttctggatacaggttcaccgactactacttccactgggtgcgacaggcccctggacaagggcttgagtggatgggaaggataaaccctaatactggtgagacaaactatgcacagaggttccagggcagcgtcaccatgaccagggacacgtccatcaatacaggatacatggagttgagacggctgtcattagacgacacggccgtctattattgtgcgagag

SEQ ID NO: 9363 - DNA, 282 bp, Homo sapiens
gacatccagatgacccagtctccatcctccctgtctgcgtctattggagacagaatctccatcacttgccgggcaagtcagaccattggtagttacttgaattggtatcagcacaagccaggaaaagcccctaaactcctgatctctgctgcatccactttgcaaagtggggtcccatcgaggttcagtggcagtggatccgggacaggattcactctcaccatcagcagtctgcaacctgatgattctgcaacttactactgtcaacagagttacactccc

SEQ ID NO: 9364 - DNA, 296 bp, Homo sapiens
gaggtgcagctggtggagtctgggggaggcctggtgacgccgggggggtccctgagactctcctgtgtaggttccgggttcaatttccgtggatacaggatgaactgggtccgccaggcacctgggaagggtcttgagtggatttcatacattactactgatagcactacgaagacctatgcagactctgtcaagggccgattcaccatctccagagacaatgccgggagttcattgcacctgcaaatgaacgacctgagagacgaggacacggctgtgtatttctgtgcgcgaga

SEQ ID NO: 9365 - DNA, 287 bp, Homo sapiens
gaaattgtgttgacgcagtctccaggcaccctgtctttgtctccaggggagagagcctccctctcctgcagggccagtcagagtattaataataggtatttagcctggtaccagcaaacacctggccaggctcccagactcctcatctttggtgcctccaatagggccactggcatcccaaataggttcagtggcagtgggtctgggacagacttcactctcaccatcagcagactggagcctgaagactttgcagtttattactgtcagcactatggtgcttcacc

SEQ ID NO: 9366 - DNA, 296 bp, Homo sapiens
caggtgcagctggtggagtctgggggaggcgtggtccagcctgggaggtccctgagactctcctgtgaagcctctggattcaccttcagtaggtttggcatgcactgggtccgccaggctccaggcaaggggctggagtggctggcagttatttcatatgatggaagtcatacatactatggagactccgtgaggggccgattcaccatctccagagacaattccaagaacacgctgtatctgcaagtgaacagcctgagacctgaggacacggctgtttattactgtgcgaaaga

SEQ ID NO: 9367 - DNA, 282 bp, Homo sapiens
gacatccagatgacccagtctccttccaccctgtctgcacctgtaggagacagagtcaccatcacttgccgggccagtcagggtattaataactggttggcctggtatcagcagaaaccagggaaagcccctaaactcctgatctatcaggcgtctactttagaaagtggggtcccatcaaggttcagcggcagtggctctgggacagaattcactctcaccatcagcagcctgcagcctgaagattttgcaacttattactgccaacaatatcatgaatat

SEQ ID NO: 9368 - DNA, 291 bp, Homo sapiens
tgcagctgcaggagtcgggcccgggactggtgaacccttcggagaccgtgtccctcacctgcactgtctctggtgggtccatcagtcgtagtcgttactactggggctgggtccgccagcccccagggaagggaccggagtggattgcaagtaccaaaactagtggacacacctggtacaacccgtccctcgagagtcgagtcaccatttccatggacacgtccaagaaccagatctccctgaatctgaggtctgtgaccgccgcagacacggctatatattactgtgcga

SEQ ID NO: 9369 - DNA, 284 bp, Homo sapiens
gaaatagtgatgacgcagtctccagccaccctgtctgtgtctccaggggatagagccaccctctcctgcagggccagtcagagtgttggcagcaccttagcctggtaccagcagaaacctggccaggctcccaggctcctcatctatgctgcatccagcagggccactggtgtcccagccaggttcagtggcagtgggtctggtagagagttcactctcaccatcaacagcctgcagtctgaagattttgcagtttactactgtcagaagtatgataactggcc

SEQ ID NO: 9370 - DNA, 295 bp, Homo sapiens
gaggtgcagctggtggagtctgggggaggcttggaacagcctggggggtccctgagactctcctgtggagtctctggattcaccttcagtgatcacagtatgcattgggtccgccaggctccagggcgggggctggagtggctttcattcattagtactagtggttccatcaggtactacgcagactctgtgaagggccgattcaccgtctccagagacaatgccaagaactcactttatctgcaaatggacagcctgagagacgaggacacggctctctactactgtgcgagag

SEQ ID NO: 9371 - DNA, 286 bp, Homo sapiens
gacatccagatgacccagtctccatcctcactgtctgcatctgtgggagacagagtcaccatcacttgtcgggcgagtcgtgacattagcgattatttagcctggtttcagcagaaaccaggcgaagcccctaagcccctgatctatggtgcatccagtttgcaaagtggcgtcccctcaaggttcagcggcagtggatctgggacagacttcactttcaccatcagcagcctgcagcctgaagattttggaacttatttctgccaacaatataatagttaccctc

SEQ ID NO: 9372 - DNA, 293 bp, Homo sapiens
tgcagctgcaggagtcgggcccaggactggtgaagccttcggagaccctgtccctcacctgcagtgtgtctggtgactccgtcggcagtggtccctactgctggggctggatccgccagtccccaggggggggactgcagtggattgggagtatttgtaatagaggggagtcgaactacactccgaccctcaagagtcgcctcgccatctccgcggacacatccaggaaccaggtctccctgaggctgacctcggtaactgacgccgacacggctgtttattattgtgcgaga

SEQ ID NO: 9373 - DNA, 275 bp, Homo sapiens; identical to SEQ ID NO: 9359

SEQ ID NO: 9374 - DNA, 296 bp, Homo sapiens
gaggtgcagctgttggagtctgggggaggcttggtacagcctggggggtccctgagactctcctgtgcagcctctggattcagctttagcagttatgccatgagctgggtccgccaggctccagggaaggggctggagtgggtctcagcaattagtggcagtggtgatagtacatacgacgcagactatgtgaagggccggttcaccatctccagagacaattcgaagaacacgctgtatttggaaatgaacagcctgactgccgaggacacggccgtatattactgtgcgaagga

SEQ ID NO: 9375 - DNA, 286 bp, Homo sapiens
gaaattgtgttgacacagtctccagccaccctgtctctgtctccaggggaaagagccaccctcccctgcagggccagtcagagtgttggcagctccttagtctggtaccaacagaaacctggccaggctcccaggctcctcatctatgatgcatccaacagggccactggcatcccagccaggttcagtggcagtgggtctgggacagacttcactctcaccatcagcagcctagagcctgaagattttgcagtttattactgtcaccagcgttacaactggcctc

SEQ ID NO: 9376 - DNA, 293 bp, Homo sapiens
aggtgcagctggtggagtctgggggaggcttggtcaagcctggagggtccctgagactctcctgtgcagcctctggattcaccttcgatgactactacatgagctgggtccgccaggctccagggaagggactggagtgggtctcatatattagcagtagcggtactatcatattctacgcagactctgtgaagggccgattcatcgtctccagggacaacgccaagaactccttgtttttagagatgaacagcctgagagacgaggacacgggccgatattactgtgcgaga

SEQ ID NO: 9377 - DNA, 283 bp, Homo sapiens
gacatccagatgacccagtccccatcctccctgtctgcatctgtaggagacagagtcaccatcacttgccgggcgagtcaggacattagcaactatttgaattggtatcagcagaaaccagggaaagccccaaagctcctgatctacgctgcctccaacttacagacaggggtcccatcaaggttcagtggaagtggatttgggacagattttactttcaccatcagcagcctgcagcctgaagattttgctacatattactgtcaacaaaatcataatgtcc

SEQ ID NO: 9378 - DNA, 292 bp, Homo sapiens
caggtgcagctgcaggagtcgggcccaggactggtgaagccttcggagaccctgtccctcacctgcactgtctctggtggctccatcagtagttactactggagctggatccggcagcccccagggaagggactggagtggattgggtatatctattacagtgggagcaccaactacaacccctccctcaagagtcgagtcaccatatcagtagacacgtccaagaaccagttctccctgaagctgagctctgtgaccgctgcggacacggccgtgtattactgtgcgagag

SEQ ID NO: 9379 - DNA, 287 bp, Homo sapiens
gacatccagatgacccagtctccatcctcactgtctgcatctgtaggagacagagtcaccatcacttgtcgggcgagtcagggcattagcaattatttagcctggtttcagcagaaaccagggaaagcccctaagtccctgatctatgctgcatccagtttgcaaagtggggtcccatcaaagttcagcggcagtggatctgggacagatttcactctcaccatcagcagcctgcagcctgaagattttgcaacttattactgccaacagtataatagttaccctcc

SEQ ID NO: 9380 - DNA, 294 bp, Homo sapiens
aggtgcagctggtgcagtctggggctgaggtgaagaagcctggggcctcagtgaaggtctcctgcaaggcttctggatacaccttcaccggctactatatgcactgggtgcgacaggcccctggacaagggcttgagtggatgggatggatcaaccctaacagtggtggcacaaactatgcacagaagtttcagggcagggtcaccatgaccagggacacgtccatcagcacagcctacatggagctgagcaggctgagatctgacgacacggccgtgtattactgtgcgagag

SEQ ID NO: 9381 - DNA, 284 bp, Homo sapiens
gacatccagatgacccagtctccatcctccctgtctgcatctgtaggagacagagtcaccatcacttgccgggcaagtcagagcattagcagctatttaaattggtatcagcagaaaccagggaaagcccctaagctcctgatctatgctgcatccagtttgcaaagtggggtcccatcaaggttcagtggcagtggatctgggacagatttcactctcaccatcagcagtctgcaacctgaagattttgcaacttactactgtcaacagagttacagtacccc

SEQ ID NO: 9382 - DNA, 292 bp, Homo sapiens
gtgcagctggtggagtctgggggaggcttggtacagcctggcaggtccctgagactctcctgtgcagcctctggattcacctttgatgattatgccatgcactgggtccggcaagctccagggaagggcctggagtgggtcgcaggtattagttggaatagtggtagcataggctatgcggactctgtgaagggccgattcaccatctccagagacaacgccaagaactccctgtttctgcaaatgaacagtctgagagctgaggacacggccttgtattcctgtgcaaaag

SEQ ID NO: 9383 - DNA, 287 bp, Homo sapiens
gaaatagtgatgacgcagtctccagccaccctgtctgtgtctccaggggaaagagccaccctctcctgcagggccagtcagagtgttagcagcaacttggcctggtaccagcagaaacctggccaggctcccaggctcctcatctatggtgcatccaccagggccactggtatcccagccaggttcagtggcagtgggtctgggacagagttcactctcaccatcagcagcctgcagtctgaagattttgcagtttattactgtcagcagtataataactggcctcc

SEQ ID NO: 9384 - DNA, 294 bp, Homo sapiens
aggtgcagctggtgcagtctggggctgaggtgaagaagcctgggtcctcggtgaaggtctcctgcaaggcttctggaggcaccttcagcagctatgctatcagctgggtgcgacaggcccctggacaaggtcttgagtggatgggagggatcatccctatctttggtacagcaaactacgcacagaagttccagggcagagtcacgattaccgcggacgaatccacgagcacagcctacatggagctgagcagcctgagatctgaggacacggccgtgtattactgtgcgagag

SEQ ID NO: 9385 - DNA, 296 bp, Homo sapiens
gatattgtgatgactcagtctccactctccctgcccgtcacacctggagagccggcctccatctcctgcaggtctagtcagagcctcctgcatagtaatggatacaactatttggattggtacctgcagaagccagggcagtctccacagctcctgatctatttgggttctaatcgggcctccggggtccctgacaggttcagtggcagtggatcaggcacagattttacactgaaaatcagcagagtggaggctgaggatgttggggtttattactgcatgcaagctctacaaac

SEQ ID NO: 9386 - DNA, 293 bp, Homo sapiens
caggtgcagctggtggagtctgggggaggcgtggtccagcctgggaggtccctgagactctcctgtgcagcctctggattcaccttcagtagctatgctatgcactgggtccgccaggctccaggcaaggggctggagtgggtgacaattatatcatatgatggaagtaataaatactacgcagactccgtgaagggccgattcaccatctccagagacaattccaagaacacgctgtatctgcaaatgaacagcctgagagctgaggacacggctgtgtattactgtgcgag

SEQ ID NO: 9387 - DNA, 284 bp, Homo sapiens
gaaatagtgatgacgcagtctccagccaccctgtctgtgtctccaggggaaagagccaccctctcctgcagggccagtcagagtgttagcagcaacttggcctggtaccagcagaaacctggccaggctcccaggctcctcatctatggtgcatccaccagggccactggtatcccagccaggttcagtggcagtgggtctgggacagagttcactctcaccatcagcagcctgcagtctgaagattttgcagtttattactgtcagcagtataataactggcc

SEQ ID NO: 9388 - DNA, 296 bp, Homo sapiens
caggtgcagctggtggagtctgggggaggcgtggtccagcctgggaggtccctgagactctcctgtgcagcctctggattcaccttcagtagctatggcatgcactgggtccgccaggctccaggcaaggggctggagtgggtggcagttatatcatatgatggaagtaataaatactatgcagactccgtgaagggccgattcaccatctccagagacaattccaagaacacgctgtatctgcaaatgaacagcctgagagctgaggacacggctgtatattactgtgcgaaaga

SEQ ID NO: 9389 - DNA, 284 bp, Homo sapiens
gacatccagatgacccagtctccatcctccctgtctgcatctgtaggagacagagtcaccatcacttgccgggcaagtcagagcattagcagctctttaaattggtatcagcagaaaccagggaaagcccctaaactcctgatctatgctgcatccagtttgcaaagtggggtcccatcaaggttcagtggcagtggatctgggacagatttcactctcaccatcagcagtctgcaacctgaagattttgcaacttactactgtcaacagagttacagtactcc

SEQ ID NO: 9390 - DNA, 295 bp, Homo sapiens
aggtgcagctggtggagtctgggggaggcttggtcaagcctggagggtccctgagactctcctgtgcagcctctggattcaccttcagtgactactacatgagctggatccgccaggctccagggaaggggctggagtgggtttcatacattagtagtagtggtagtaccatatactacgcagactctgtgaagggccgattcaccatctccagggacaacgccaagaactcactgtatctgcaaatgaacagcctgagagccgaggacacggccgtgtattactgtgcgagaga

SEQ ID NO: 9391 - DNA, 287 bp, Homo sapiens; identical to SEQ ID NO: 9383

SEQ ID NO: 9392 - DNA, 294 bp, Homo sapiens
aggtgcagctggtgcagtctggggctgaggtgaagaagcctgggtcctcggtgaaggtctcctgcaaggcttctggaggcaccttcagcagctatgctatcagctgggtgcgacaggcccctggacaagggcttgagtggatgggagggatcatccctatgtttggtgcagcaaactacgcacagaagttccagggcagagtcacgattaccgcggacgaatccacgagcacagcctacatggagctgagcagcctgagatctgaggacacggccgtgtattactgtgcgagag

SEQ ID NO: 9393 - DNA, 293 bp, Homo sapiens
gatattgtgatgactcagtctccactctccctgcccgtcacccctggagagccggcctccatctcctgcaggtctagtcagagcctcctgcatagtaatggatacaactatttggattggtacctgcagaagccagggcagtctccacagctcctgatctatttgggttctaatcgggcctccggggtccctgacaggttcagtggcagtggatcaggcacagattttacactgaaaatcagcagagtggaggctgaggatgttggggtttattactgcatgcaagctctaca

SEQ ID NO: 9394 - DNA, 302 bp, Homo sapiens
gaggtgcagctggtggagtctgggggaggcttggtaaagcctggggggtcccttagactctcctgtgcagcctctggattcactttcagtaacgcctggatgagctgggtccgccaggctccagggaaggggctggagtgggttggccgtattaaaagcaaaactgatggtgggacaacagactacgctgcacccgtgaaaggcagattcaccatctcaagagatgattcaaaaaacacgctgtatctgcaaatgaacagcctgaaaaccgaggacacagccgtgtattactgtaccacaga

SEQ ID NO: 9395 - DNA, 297 bp, Homo sapiens
gatattgtgatgactcagtctccactctccctgcccgtcacccctggagagccggcctccatctcctgcaggtctagtcagagcctcctgcatagtaatggatacaactatttggattggtacctgcagaagccagggcagtctccacagctcctgatctatttgggttctaatcgggcctccggggtccctgacaggttcagtggcagtggatcaggcacagattttacactgaaaatcagcagagtggaggctgaggatgttggggtttattactgcatgcaagctctacaaact

SEQ ID NO: 9396 - DNA, 296 bp, Homo sapiens
gaggtgcagctggtggagtctgggggaggcttggtccagcctggggggtccctgagactctcctgtgcagcctctggattcacctttagtagctattggatgagctgggtccgccaggctccggggaaggggctggagtgggtggcctacataaagcaagatggaagtgagaaatactatgtggactctgtgaagggccgattcaccatctccagagacaacgccaagaactcactgtatctgcaaatgaacagcctgagagccgaggacacggccgtgtattactgtgcgagaga

SEQ ID NO: 9397 - DNA, 287 bp, Homo sapiens
gaaatagtgatgacgcagtctccagccaccctgtctgtgtctccaggggaaagagccaccctctcctgcagggccagtcagagtgttagcagcaacttagcctggtaccagcagaaacctggccaggctcccaggctcctcatctatggtgcatccaccagggccactggtatcccagccaggttcagtggcagtgggtctgggacagagttcactctcaccatcagcagcctgcagtctgaagattttgcagtttattactgtcagcagtataataactggcctcc

SEQ ID NO: 9398 - DNA, 297 bp, Homo sapiens
caggtgcagctgcaggagtcgggcccaggactggtgaagccttcacagaccctgtccctcacctgcactgtctctggtggctccatcagcagtggtggttactactggagctggatccgccagcacccagggaagggcctggagtggattgggtacatctattacagtgggagcacctactacaacccgtccctcaagagtcgagttaccatatcagtagacacgtctaagaaccagttctccctgaagctgagctctgtgactgccgcggacacggccgtgtattactgtgcgaga

SEQ ID NO: 9399 - DNA, 298 bp, Homo sapiens
caggtgcagctgcaggagtcgggcccaggactggtgaagccttcacagaccctgtccctcacctgcactgtctctggtggctccatcagcagtggtggttactactggagctggatccgccagcacccagggaagggcctggagtggattgggtacatctattacagtgggagcacctactacaacccgtccctcaagagtcgagttaccatatcagtagacacgtctaagaaccagttctccctgaagctgagctctgtgactgccgcggacacggccgtgtattactgtgcgagag

SEQ ID NO: 9400 - DNA, 294 bp, Homo sapiens; identical to SEQ ID NO: 9380

SEQ ID NO: 9401 - DNA, 284 bp, Homo sapiens
gacatccagatgacccagtctccatcctccctgtctgcatctgtaggagacagagtcaccatcacttgccgggcgagtcagggcattagcaattatttagcctggtatcagcagaaaccagggaaagttcctaagctcctgatctatgctgcatccactttgcaatcaggggtcccatctcggttcagtggcagtggatctgggacagatttcactctcaccatcagcagcctgcagcctgaagatgttgcaacttattactgtcaaaagtataacagtgcccc

SEQ ID NO: 9402 - DNA, 302 bp, Homo sapiens
gaggtgcagctggtggagtctgggggagacttggtggagcctggggggtcccttagactctcctgtgcagcctctggattcaatttcaatatcgcctggatgaactgggtccgccaggctccagggaagggcctggagtgggttggccgtattaaaagcaatactgacggtgggacaacagactacgctgcacccgtgaaaggcagattcaccatctcaagagatgattcaaaatacacgctgtttttgcagatgaacaggctgcagaccgaggacacagccgtctattattgtaccacaga

SEQ ID NO: 9403 - DNA, 283 bp, Homo sapiens
gacatccagatgacccagtctccttccaccctgtctgcatctgtaggagacagagtcaccatcacttgccgggccaatcagactattagtacctggttggcctggtatcagcagaaaccagggaaagcccctaagctcctaatctataaggcgtctaattttgcaagtggggtcccatcaaggttcagcggcagtggatctgggacagaattcactctcaccatcagcagcctgcagcctgacgattttgcaagttattactgccaacagtataatagttatt

SEQ ID NO: 9404 - DNA, 296 bp, Homo sapiens
caggtgcagctggtggagtctgggggaggcgtggtccagcctgggaggtccctgagactctcctgtgcagcctctggattcaccttcagtagctatggcatacactgggtccgccaggctccaggcaaggggctggagtgggtggcagttatatcatatgatggaagtaataaatactatgcagactccgtgaagggccgattcaccatctccagagacaattccaagaacacgctgtatctgcaaatgaacagcctgagagctgaggacacggctatgtattactgtgcgaaaga

SEQ ID NO: 9405 - DNA, 287 bp, Homo sapiens
gaaatagtgatgacgcagtctccagccaccctgtctgtgtctccaggggaaagagccgccctctcctgcagggccagtcagagtgttagcaggaacctagcctggtaccagcagaaacctggccaggctcccaggctcctcatctatggtgcatccaccagggccactggtatcccagccaggttcagtggcagtgggtctgggacagagttcactctcaccatcagcagcctgcagtctgaagattttgcagtttattactgtcagcagtataataagtggcctcc

SEQ ID NO: 9406 - DNA, 284 bp, Homo sapiens
gacatccagatgacccagtctccatcctccctgtctgcatctgtaggagacagagtcaccatcacttgccaggcgagtcaggacattagcaactatttaaattggtatcagcagaaaccagggaaagcccctaagctcctgatctacgatgcatccaatttggaaacaggggtcccatcaaggttcagtggaagtggatctgggacagattttactttcaccatcagcagcctgcagcctgaagatattgcaacatattactgtcaacagtatgataatctccc

SEQ ID NO: 9407 - DNA, 285 bp, Homo sapiens
gaaattgtgttgacgcagtctccaggcaccctgtctttgtctccaggggaaagagccaccctctcctgcagggccagtcagagtgttagcagcagctacttagcctggtaccagcagaaacctggccaggctcccaggctcctcatctatggtgcatccagcagggccactggcatcccagacaggttcagtggcagtgggtctgggacagacttcactctcaccatcagcagactggagcctgaagattttgcagtgtattactgtcagcagtatggtagctca

SEQ ID NO: 9408 - DNA, 75 bp, Homo sapiens; identical to SEQ ID NO: 1379

SEQ ID NO: 9409 - DNA, 74 bp, Homo sapiens; identical to SEQ ID NO: 1380

SEQ ID NO: 9410 - DNA, 75 bp, Homo sapiens
gaggtgcagctggtggagtctgggggaggcttggtccagcctggagggtccctgaaactctcctgtgcagcttct

SEQ ID NO: 9411 - DNA, 78 bp, Homo sapiens
gacatcgtgatgacccagtctccagacttcctggctgtgtctctgggcgagagggccaccatcaactgcaagtccagc

SEQ ID NO: 9412 - DNA, 71 bp, Homo sapiens
tgcagctgcaggagtccggctcaggactggtgaggccctcacagaccctgtccctcacgtgcgctgtctct

SEQ ID NO: 9413 - DNA, 78 bp, Homo sapiens
gacatccagatgacccagtctccatcctccctgtctgcatctgtgggagacagagtcaccatcacttgccaggcgagt

SEQ ID NO: 9414 - DNA, 75 bp, Homo sapiens
gaggtgcagctggtggagtctgggggaggctcggtccagcctggggggtccctgagactttcctgtgtagcctct

SEQ ID NO: 9415 - DNA, 74 bp, Homo sapiens
ttgtgatgactcagtctccactctccctgcccgtcacccttggacagccggcctccatctcctgtaggtctagt

SEQ ID NO: 9416 - DNA, 75 bp, Homo sapiens
gaggtgcagctgttggagtctgggggaggcttggcacagcctggggggtccctcagactctcctgtgcagcctct

SEQ ID NO: 9417 - DNA, 78 bp, Homo sapiens; identical to SEQ ID NO: 1384

SEQ ID NO: 9418 - DNA, 75 bp, Homo sapiens
gaggtgcagctggtggagtctgggggaggcttggtccagcctggggggtccctgagcctctcctgtgcagcctct

SEQ ID NO: 9419 - DNA, 78 bp, Homo sapiens
gaaattgtgttgacacagtctccacccaccctgtctttgtctccaggggaaggagccaccctctcctgcagggccagt

SEQ ID NO: 9420 - DNA, 75 bp, Homo sapiens
gaggtgcagctggtggagtctgggggaggcttggtgcagcctggggggtccctgagactctcctgcgcagcctct

SEQ ID NO: 9421 - DNA, 78 bp, Homo sapiens
gacatcgtgatgacccagtctccagactccctggctgtgtctctgggcgagagggccaccatcaattgcaagtccagc

SEQ ID NO: 9422 - DNA, 74 bp, Homo sapiens
aggtgcagctggtgcagtctgggcctgaggtgaagaagtctggggcctcagtgaagatttcctgcaaggcttct

SEQ ID NO: 9423 - DNA, 78 bp, Homo sapiens; identical to SEQ ID NO: 1425

SEQ ID NO: 9424 - DNA, 72 bp, Homo sapiens
gtgcagctggtgcagtctggagcagaggtgaaaaagcccggggagtctctgaggatctcctgtaaggcttct

SEQ ID NO: 9425 - DNA, 78 bp, Homo sapiens; identical to SEQ ID NO: 1376

SEQ ID NO: 9426 - DNA, 75 bp, Homo sapiens; identical to SEQ ID NO: 1404

SEQ ID NO: 9427 - DNA, 78 bp, Homo sapiens
gacatccagatgacccagtctccttccacactgtctgcatctgtaggagacagagtcactattacttgtcgggccagt

SEQ ID NO: 9428 - DNA, 74 bp, Homo sapiens
aggtgcagctggtgcagtctggggctgaggtgaagaagcctgggtcctccgtgaaggtctcctgcagggcgtct

SEQ ID NO: 9429 - DNA, 78 bp, Homo sapiens; identical to SEQ ID NO: 1378

SEQ ID NO: 9430 - DNA, 75 bp, Homo sapiens
gaggtgcagctggtggagtctgggggaggcttggtccagcctgacgggtccctgagactctcctgtgtagcctct

SEQ ID NO: 9431 - DNA, 78 bp, Homo sapiens
gacatccagatgacccagtctccatcctcactgtctgcatctgtaggagacagagttaccatcacttgtcgggcgagc

SEQ ID NO: 9432 - DNA, 75 bp, Homo sapiens
gaggtgcagctggtggagtctgggggaggcttggtaaagcctggggggtcccttagactctcctgtgcagtctct

SEQ ID NO: 9433 - DNA, 74 bp, Homo sapiens; identical to SEQ ID NO: 1380

SEQ ID NO: 9434 - DNA, 71 bp, Homo sapiens
tgcagctggtgcagtctgggcctgaggtgaagaagcctgggacctcagtgaaggtctcctgcaaggcttct

SEQ ID NO: 9435 - DNA, 78 bp, Homo sapiens; identical to SEQ ID NO: 1401

SEQ ID NO: 9436 - DNA, 75 bp, Homo sapiens
gaggtgcagctggtgcagtctggcgcagaggtgaaaaagcccggggagtctctgaagatctcctgtaagggttct

SEQ ID NO: 9437 - DNA, 78 bp, Homo sapiens
gacatccagttgacccagtctccatccttcttgtctgcatctgtcggagacagagtcaccatcacttgcagggccagt

SEQ ID NO: 9438 - DNA, 75 bp, Homo sapiens
gaggtgcagctggtggagtctgggggaggtctggtccagcctggggggtccctgagactctcctgtgcagcctct

SEQ ID NO: 9439 - DNA, 78 bp, Homo sapiens
gaaattgtgttgacacagtctccagccaccctggttttgtctccaggggaaagagccaccctctcctgcagggccagt

SEQ ID NO: 9440 - DNA, 72 bp, Homo sapiens
gtgcagctggtggagtctgggggaggcttggcacagcctggcgggtccctgagactctcctgtgcagcctct

SEQ ID NO: 9441 - DNA, 78 bp, Homo sapiens
gacatccagatgacccagtctccttccaccctgtctgcatctgtaggagacgtagtcaccatcacttgccgggccagt

SEQ ID NO: 9442 - DNA, 74 bp, Homo sapiens
aggtgcagctggtgcagtctggggctgaggtgaagaagcctggggcctcagtgagggtctcctgtacggcttct

SEQ ID NO: 9443 - DNA, 78 bp, Homo sapiens
gacatccagatgacccagtctccatcctccctgtctgcgtctattggagacagaatctccatcacttgccgggcaagt

SEQ ID NO: 9444 - DNA, 75 bp, Homo sapiens
gaggtgcagctggtggagtctgggggaggcctggtgacgccgggggggtccctgagactctcctgtgtaggttcc

SEQ ID NO: 9445 - DNA, 78 bp, Homo sapiens
gaaattgtgttgacgcagtctccaggcaccctgtctttgtctccaggggagagagcctccctctcctgcagggccagt

SEQ ID NO: 9446 - DNA, 75 bp, Homo sapiens
caggtgcagctggtggagtctgggggaggcgtggtccagcctgggaggtccctgagactctcctgtgaagcctct

SEQ ID NO: 9447 - DNA, 78 bp, Homo sapiens
gacatccagatgacccagtctccttccaccctgtctgcacctgtaggagacagagtcaccatcacttgccgggccagt

SEQ ID NO: 9448 - DNA, 71 bp, Homo sapiens
tgcagctgcaggagtcgggcccgggactggtgaacccttcggagaccgtgtccctcacctgcactgtctct

SEQ ID NO: 9449 - DNA, 78 bp, Homo sapiens
gaaatagtgatgacgcagtctccagccaccctgtctgtgtctccaggggatagagccaccctctcctgcagggccagt

SEQ ID NO: 9450 - DNA, 75 bp, Homo sapiens
gaggtgcagctggtggagtctgggggaggcttggaacagcctggggggtccctgagactctcctgtggagtctct

SEQ ID NO: 9451 - DNA, 78 bp, Homo sapiens
gacatccagatgacccagtctccatcctcactgtctgcatctgtgggagacagagtcaccatcacttgtcgggcgagt

SEQ ID NO: 9452 - DNA, 71 bp, Homo sapiens
tgcagctgcaggagtcgggcccaggactggtgaagccttcggagaccctgtccctcacctgcagtgtgtct

SEQ ID NO: 9453 - DNA, 78 bp, Homo sapiens; identical to SEQ ID NO: 9439

SEQ ID NO: 9454 - DNA, 75 bp, Homo sapiens; identical to SEQ ID NO: 1438

SEQ ID NO: 9455 - DNA, 78 bp, Homo sapiens
gaaattgtgttgacacagtctccagccaccctgtctctgtctccaggggaaagagccaccctcccctgcagggccagt

SEQ ID NO: 9456 - DNA, 74 bp, Homo sapiens
aggtgcagctggtggagtctgggggaggcttggtcaagcctggagggtccctgagactctcctgtgcagcctct

SEQ ID NO: 9457 - DNA, 78 bp, Homo sapiens
gacatccagatgacccagtccccatcctccctgtctgcatctgtaggagacagagtcaccatcacttgccgggcgagt

SEQ ID NO: 9458 - DNA, 75 bp, Homo sapiens; identical to SEQ ID NO: 1426

SEQ ID NO: 9459 - DNA, 78 bp, Homo sapiens
gacatccagatgacccagtctccatcctcactgtctgcatctgtaggagacagagtcaccatcacttgtcgggcgagt

SEQ ID NO: 9460 - DNA, 74 bp, Homo sapiens; identical to SEQ ID NO: 5587

SEQ ID NO: 9461 - DNA, 78 bp, Homo sapiens; identical to SEQ ID NO: 1451

SEQ ID NO: 9462 - DNA, 72 bp, Homo sapiens; identical to SEQ ID NO: 5560

SEQ ID NO: 9463 - DNA, 78 bp, Homo sapiens; identical to SEQ ID NO: 1372

SEQ ID NO: 9464 - DNA, 74 bp, Homo sapiens
aggtgcagctggtgcagtctggggctgaggtgaagaagcctgggtcctcggtgaaggtctcctgcaaggcttct

SEQ ID NO: 9465 - DNA, 78 bp, Homo sapiens
gatattgtgatgactcagtctccactctccctgcccgtcacacctggagagccggcctccatctcctgcaggtctagt

SEQ ID NO: 9466 - DNA, 75 bp, Homo sapiens; identical to SEQ ID NO: 1375

SEQ ID NO: 9467 - DNA, 78 bp, Homo sapiens; identical to SEQ ID NO: 1372

SEQ ID NO: 9468 - DNA, 75 bp, Homo sapiens; identical to SEQ ID NO: 1375

SEQ ID NO: 9469 - DNA, 78 bp, Homo sapiens; identical to SEQ ID NO: 1451

SEQ ID NO: 9470 - DNA, 74 bp, Homo sapiens; identical to SEQ ID NO: 9456

SEQ ID NO: 9471 - DNA, 78 bp, Homo sapiens; identical to SEQ ID NO: 1372

SEQ ID NO: 9472 - DNA, 74 bp, Homo sapiens; identical to SEQ ID NO: 9464

SEQ ID NO: 9473 - DNA, 78 bp, Homo sapiens; identical to SEQ ID NO: 1401

SEQ ID NO: 9474 - DNA, 75 bp, Homo sapiens; identical to SEQ ID NO: 5595

SEQ ID NO: 9475 - DNA, 78 bp, Homo sapiens; identical to SEQ ID NO: 1401

SEQ ID NO: 9476 - DNA, 75 bp, Homo sapiens; identical to SEQ ID NO: 5597

SEQ ID NO: 9477 - DNA, 78 bp, Homo sapiens; identical to SEQ ID NO: 1372

SEQ ID NO: 9478 - DNA, 75 bp, Homo sapiens; identical to SEQ ID NO: 1402

SEQ ID NO: 9479 - DNA, 75 bp, Homo sapiens; identical to SEQ ID NO: 1402

SEQ ID NO: 9480 - DNA, 74 bp, Homo sapiens; identical to SEQ ID NO: 5587

SEQ ID NO: 9481 - DNA, 78 bp, Homo sapiens
gacatccagatgacccagtctccatcctccctgtctgcatctgtaggagacagagtcaccatcacttgccgggcgagt

SEQ ID NO: 9482 - DNA, 75 bp, Homo sapiens
gaggtgcagctggtggagtctgggggagacttggtggagcctggggggtcccttagactctcctgtgcagcctct

SEQ ID NO: 9483 - DNA, 78 bp, Homo sapiens
gacatccagatgacccagtctccttccaccctgtctgcatctgtaggagacagagtcaccatcacttgccgggccaat

SEQ ID NO: 9484 - DNA, 75 bp, Homo sapiens; identical to SEQ ID NO: 1375

SEQ ID NO: 9485 - DNA, 78 bp, Homo sapiens
gaaatagtgatgacgcagtctccagccaccctgtctgtgtctccaggggaaagagccgccctctcctgcagggccagt

SEQ ID NO: 9486 - DNA, 78 bp, Homo sapiens
gacatccagatgacccagtctccatcctccctgtctgcatctgtaggagacagagtcaccatcacttgccaggcgagt

SEQ ID NO: 9487 - DNA, 78 bp, Homo sapiens; identical to SEQ ID NO: 1378

SEQ ID NO: 9488 - DNA, 24 bp, Homo sapiens
gggttcacctttagtttgtattgg

SEQ ID NO: 9489 - DNA, 33 bp, Homo sapiens
caaggcctcgtgtccagtgatggaaccacctac

SEQ ID NO: 9490 - DNA, 24 bp, Homo sapiens
ggattcagattcagtgaccactac

SEQ ID NO: 9491 - DNA, 36 bp, Homo sapiens
cagaatgttttatacaactccaacaataagaactac

SEQ ID NO: 9492 - DNA, 30 bp, Homo sapiens
ggtgtctccatcagtagtggcacttactcc

SEQ ID NO: 9493 - DNA, 18 bp, Homo sapiens
caggacattagcaactct

SEQ ID NO: 9494 - DNA, 24 bp, Homo sapiens
ggattcacctttagtaacttttgg

SEQ ID NO: 9495 - DNA, 33 bp, Homo sapiens
caaagcctcgtatacagtgatggaaacacctac

SEQ ID NO: 9496 - DNA, 24 bp, Homo sapiens
ggattcacctttagcggctatgcc

SEQ ID NO: 9497 - DNA, 18 bp, Homo sapiens
cagagtgttagtaggtcc

SEQ ID NO: 9498 - DNA, 24 bp, Homo sapiens
ggattcacctttagtaatttttgg

SEQ ID NO: 9499 - DNA, 18 bp, Homo sapiens
cagagtgttagcggctcc

SEQ ID NO: 9500 - DNA, 24 bp, Homo sapiens
ggattcacttttagtagccattgg

SEQ ID NO: 9501 - DNA, 36 bp, Homo sapiens
cggagtcttttaagcagctccaacaacaagaactac

SEQ ID NO: 9502 - DNA, 24 bp, Homo sapiens
ggatacaccttcagtaactatgct

SEQ ID NO: 9503 - DNA, 36 bp, Homo sapiens
cagagtgttttttacaggtccaccaataagaactac

SEQ ID NO: 9504 - DNA, 24 bp, Homo sapiens
ggctacacctttaccacctactat

SEQ ID NO: 9505 - DNA, 18 bp, Homo sapiens
cagagtattagtagctgg

SEQ ID NO: 9506 - DNA, 24 bp, Homo sapiens
ggtgactccatgagtactttctac

SEQ ID NO: 9507 - DNA, 18 bp, Homo sapiens
caggatatcggtaactgg

SEQ ID NO: 9508 - DNA, 24 bp, Homo sapiens
ggaggcaccttcagcagctttgct

SEQ ID NO: 9509 - DNA, 21 bp, Homo sapiens
cagagtgttagcagcagctac

SEQ ID NO: 9510 - DNA, 24 bp, Homo sapiens
ggattcacctttaattactattgg

SEQ ID NO: 9511 - DNA, 18 bp, Homo sapiens
cagggcattaacaatgat

SEQ ID NO: 9512 - DNA, 24 bp, Homo sapiens
ggattcactttcagtaacgcctgg

SEQ ID NO: 9513 - DNA, 33 bp, Homo sapiens; identical to SEQ ID NO: 9495

SEQ ID NO: 9514 - DNA, 24 bp, Homo sapiens
ggatccacctttagtagctctgct

SEQ ID NO: 9515 - DNA, 33 bp, Homo sapiens
cagagcctcctgcataataatggatacaactat

SEQ ID NO: 9516 - DNA, 24 bp, Homo sapiens
ggatacagctttacgagctactgg

SEQ ID NO: 9517 - DNA, 18 bp, Homo sapiens
cagggcattagcagttat

SEQ ID NO: 9518 - DNA, 24 bp, Homo sapiens
ggattcacatttagtaggttttgg

SEQ ID NO: 9519 - DNA, 18 bp, Homo sapiens
cactttgttaacaccttc

SEQ ID NO: 9520 - DNA, 24 bp, Homo sapiens
ggattcaactttggttattataac

SEQ ID NO: 9521 - DNA, 18 bp, Homo sapiens
cagagtattagtagttgg

SEQ ID NO: 9522 - DNA, 24 bp, Homo sapiens
ggatacaggttcaccgactactac

SEQ ID NO: 9523 - DNA, 18 bp, Homo sapiens
cagaccattggtagttac

SEQ ID NO: 9524 - DNA, 24 bp, Homo sapiens
gggttcaatttccgtggatacagg

SEQ ID NO: 9525 - DNA, 21 bp, Homo sapiens
cagagtattaataataggtat

SEQ ID NO: 9526 - DNA, 24 bp, Homo sapiens
ggattcaccttcagtaggtttggc

SEQ ID NO: 9527 - DNA, 18 bp, Homo sapiens
cagggtattaataactgg

SEQ ID NO: 9528 - DNA, 30 bp, Homo sapiens
ggtgggtccatcagtcgtagtcgttactac

SEQ ID NO: 9529 - DNA, 18 bp, Homo sapiens
cagagtgttggcagcacc

SEQ ID NO: 9530 - DNA, 24 bp, Homo sapiens
ggattcaccttcagtgatcacagt

SEQ ID NO: 9531 - DNA, 18 bp, Homo sapiens
cgtgacattagcgattat

SEQ ID NO: 9532 - DNA, 30 bp, Homo sapiens
ggtgactccgtcggcagtggtccctactgc

SEQ ID NO: 9533 - DNA, 18 bp, Homo sapiens
cactttgttaacaccttc

SEQ ID NO: 9534 - DNA, 24 bp, Homo sapiens
ggattcagctttagcagttatgcc

SEQ ID NO: 9535 - DNA, 18 bp, Homo sapiens
cagagtgttggcagctcc

SEQ ID NO: 9536 - DNA, 24 bp, Homo sapiens
ggattcaccttcgatgactactac

SEQ ID NO: 9537 - DNA, 18 bp, Homo sapiens
caggacattagcaactat

SEQ ID NO: 9538 - DNA, 24 bp, Homo sapiens
ggtggctccatcagtagttactac

SEQ ID NO: 9539 - DNA, 18 bp, Homo sapiens
cagggcattagcaattat

SEQ ID NO: 9540 - DNA, 24 bp, Homo sapiens
ggatacaccttcaccggctactat

SEQ ID NO: 9541 - DNA, 18 bp, Homo sapiens
cagagcattagcagctat

SEQ ID NO: 9542 - DNA, 24 bp, Homo sapiens
ggattcacctttgatgattatgcc

SEQ ID NO: 9543 - DNA, 18 bp, Homo sapiens
cagagtgttagcagcaac

SEQ ID NO: 9544 - DNA, 24 bp, Homo sapiens
ggaggcaccttcagcagctatgct

SEQ ID NO: 9545 - DNA, 33 bp, Homo sapiens
cagagcctcctgcatagtaatggatacaactat

SEQ ID NO: 9546 - DNA, 24 bp, Homo sapiens
ggattcaccttcagtagctatgct

SEQ ID NO: 9547 - DNA, 18 bp, Homo sapiens
cagagtgttagcagcaac

SEQ ID NO: 9548 - DNA, 24 bp, Homo sapiens
ggattcaccttcagtagctatggc

SEQ ID NO: 9549 - DNA, 18 bp, Homo sapiens
cagagcattagcagctct

SEQ ID NO: 9550 - DNA, 24 bp, Homo sapiens
ggattcaccttcagtgactactac

SEQ ID NO: 9551 - DNA, 18 bp, Homo sapiens
cagagtgttagcagcaac

SEQ ID NO: 9552 - DNA, 24 bp, Homo sapiens
ggaggcaccttcagcagctatgct

SEQ ID NO: 9553 - DNA, 33 bp, Homo sapiens; identical to SEQ ID NO: 9545

SEQ ID NO: 9554 - DNA, 24 bp, Homo sapiens
ggattcactttcagtaacgcctgg

SEQ ID NO: 9555 - DNA, 33 bp, Homo sapiens; identical to SEQ ID NO: 9545

SEQ ID NO: 9556 - DNA, 24 bp, Homo sapiens
ggattcacctttagtagctattgg

SEQ ID NO: 9557 - DNA, 18 bp, Homo sapiens
cagagtgttagcagcaac

SEQ ID NO: 9558 - DNA, 30 bp, Homo sapiens; identical to SEQ ID NO: 5759

SEQ ID NO: 9559 - DNA, 30 bp, Homo sapiens; identical to SEQ ID NO: 5759

SEQ ID NO: 9560 - DNA, 24 bp, Homo sapiens
ggatacaccttcaccggctactat

SEQ ID NO: 9561 - DNA, 18 bp, Homo sapiens
cagggcattagcaattat

SEQ ID NO: 9562 - DNA, 24 bp, Homo sapiens
ggattcaatttcaatatcgcctgg

SEQ ID NO: 9563 - DNA, 18 bp, Homo sapiens
cagactattagtacctgg

SEQ ID NO: 9564 - DNA, 24 bp, Homo sapiens
ggattcaccttcagtagctatggc

SEQ ID NO: 9565 - DNA, 18 bp, Homo sapiens
cagagtgttagcaggaac

SEQ ID NO: 9566 - DNA, 18 bp, Homo sapiens
caggacattagcaactat

SEQ ID NO: 9567 - DNA, 21 bp, Homo sapiens
cagagtgttagcagcagctac

SEQ ID NO: 9568 - DNA, 51 bp, Homo sapiens; identical to SEQ ID NO: 1561

SEQ ID NO: 9569 - DNA, 51 bp, Homo sapiens
ttgagttggtatcagcagaggccaggccaatctccgaggcgcctattttat

SEQ ID NO: 9570 - DNA, 51 bp, Homo sapiens
atgaactgggtccgccaggctccagggaagggactggagtggattggccgt

SEQ ID NO: 9571 - DNA, 51 bp, Homo sapiens
ttagcttggtaccagcagataccagggcagcctcctaagttggtcatttac

SEQ ID NO: 9572 - DNA, 51 bp, Homo sapiens
tggtgctggatccggcagccaccgggggagggcctgcagtggattgggtac

SEQ ID NO: 9573 - DNA, 51 bp, Homo sapiens
ttaaattggtatcagcaaaaaccagggaaagcccctaaactcctgatctac

SEQ ID NO: 9574 - DNA, 51 bp, Homo sapiens
atgagttgggtccgccaggctccagggaaggggctggagtgggtggccaac

SEQ ID NO: 9575 - DNA, 51 bp, Homo sapiens
ttgaattggtttcagcagaggccaggccaatctccaaggcgcctaatttat

SEQ ID NO: 9576 - DNA, 51 bp, Homo sapiens
atgacctgggtccgccaggctccagggaaggggctggagtgggtctcaggt

SEQ ID NO: 9577 - DNA, 51 bp, Homo sapiens; identical to SEQ ID NO: 1574

SEQ ID NO: 9578 - DNA, 51 bp, Homo sapiens; identical to SEQ ID NO: 5973

SEQ ID NO: 9579 - DNA, 51 bp, Homo sapiens
ttagcctggtaccaacagaaacctggccaggctcccagactcctcatctat

SEQ ID NO: 9580 - DNA, 51 bp, Homo sapiens
atggcctgggtccgccaggctccagggaaggggctggagtgggtggccaat

SEQ ID NO: 9581 - DNA, 51 bp, Homo sapiens
ttagcttggtaccagcagaaatcaggacagcctcctagactgctcatgttc

SEQ ID NO: 9582 - DNA, 51 bp, Homo sapiens
gtacattgggtgcgccaggcccccggacaaaggcctgagtggatggggtgg

SEQ ID NO: 9583 - DNA, 51 bp, Homo sapiens
ttagcttggtaccagcagaaaccaggacagcctcctaagttgctcattcac

SEQ ID NO: 9584 - DNA, 51 bp, Homo sapiens
atcacctgggtgcgccagatgaccgggaaaggcctggagtggatggggagg

SEQ ID NO: 9585 - DNA, 51 bp, Homo sapiens; identical to SEQ ID NO: 1576

SEQ ID NO: 9586 - DNA, 51 bp, Homo sapiens
tggagctggatccggcagcccccagggaagggactggagtggattgggttt

SEQ ID NO: 9587 - DNA, 51 bp, Homo sapiens
ttggcctggtatcaacagaagccagggaaagcccctagcctcctcatctat

SEQ ID NO: 9588 - DNA, 51 bp, Homo sapiens; identical to SEQ ID NO: 37

SEQ ID NO: 9589 - DNA, 51 bp, Homo sapiens; identical to SEQ ID NO: 1554

SEQ ID NO: 9590 - DNA, 51 bp, Homo sapiens
atgatgtgggtccgccaggctccagggaaggggctggagtgggtggccaac

SEQ ID NO: 9591 - DNA, 51 bp, Homo sapiens
gtagcctggtttcagcagaaaccagggaaagcccctaagtccctgatcaat

SEQ ID NO: 9592 - DNA, 51 bp, Homo sapiens
atgagctgggtccgccaggctccagggaaggggctggagtgggttggccgt

SEQ ID NO: 9593 - DNA, 51 bp, Homo sapiens; identical to SEQ ID NO: 9575

SEQ ID NO: 9594 - DNA, 51 bp, Homo sapiens
gtgcagtgggtgcgacaggctcgtggacaacgccctgagtggataggatgg

SEQ ID NO: 9595 - DNA, 51 bp, Homo sapiens
ttggattggtacctgcagaagccagggcagtctccacacctcctgatctat

SEQ ID NO: 9596 - DNA, 51 bp, Homo sapiens
atcgcctgggtgcgccagatgcccgggaaaggcctggagtggatggggacc

SEQ ID NO: 9597 - DNA, 51 bp, Homo sapiens
ttagcctggtatcagcaaaaaccagggaaagcccctaagctcctgatctat

SEQ ID NO: 9598 - DNA, 51 bp, Homo sapiens; identical to SEQ ID NO: 9574

SEQ ID NO: 9599 - DNA, 51 bp, Homo sapiens
ttagcctggtatcaacagaaacctggccagtctcccaggctcctcatctct

SEQ ID NO: 9600 - DNA, 51 bp, Homo sapiens
atgcactggatccggcaagttccagggaagggcctggagtgggtctcaggt

SEQ ID NO: 9601 - DNA, 51 bp, Homo sapiens
ttggcctggtttcagcagagacccgggaaagcccctaagcccctgatctat

SEQ ID NO: 9602 - DNA, 51 bp, Homo sapiens
ttccactgggtgcgacaggcccctggacaagggcttgagtggatgggaagg

SEQ ID NO: 9603 - DNA, 51 bp, Homo sapiens
ttgaattggtatcagcacaagccaggaaaagcccctaaactcctgatctct

SEQ ID NO: 9604 - DNA, 51 bp, Homo sapiens
atgaactgggtccgccaggcacctgggaagggtcttgagtggatttcatac

SEQ ID NO: 9605 - DNA, 51 bp, Homo sapiens
ttagcctggtaccagcaaacacctggccaggctcccagactcctcatcttt

SEQ ID NO: 9606 - DNA, 51 bp, Homo sapiens
atgcactgggtccgccaggctccaggcaaggggctggagtggctggcagtt

SEQ ID NO: 9607 - DNA, 51 bp, Homo sapiens
ttggcctggtatcagcagaaaccagggaaagcccctaaactcctgatctat

SEQ ID NO: 9608 - DNA, 51 bp, Homo sapiens
tggggctgggtccgccagcccccagggaagggaccggagtggattgcaagt

SEQ ID NO: 9609 - DNA, 51 bp, Homo sapiens; identical to SEQ ID NO: 1554

SEQ ID NO: 9610 - DNA, 51 bp, Homo sapiens
atgcattgggtccgccaggctccagggcgggggctggagtggctttcattc

SEQ ID NO: 9611 - DNA, 51 bp, Homo sapiens
ttagcctggtttcagcagaaaccaggcgaagcccctaagcccctgatctat

SEQ ID NO: 9612 - DNA, 51 bp, Homo sapiens
tggggctggatccgccagtccccaggggggggactgcagtggattgggagt

SEQ ID NO: 9613 - DNA, 51 bp, Homo sapiens; identical to SEQ ID NO: 9599

SEQ ID NO: 9614 - DNA, 51 bp, Homo sapiens
atgagctgggtccgccaggctccagggaaggggctggagtgggtctcagca

SEQ ID NO: 9615 - DNA, 51 bp, Homo sapiens
ttagtctggtaccaacagaaacctggccaggctcccaggctcctcatctat

SEQ ID NO: 9616 - DNA, 51 bp, Homo sapiens
atgagctgggtccgccaggctccagggaagggactggagtgggtctcatat

SEQ ID NO: 9617 - DNA, 51 bp, Homo sapiens
ttgaattggtatcagcagaaaccagggaaagccccaaagctcctgatctac

SEQ ID NO: 9618 - DNA, 51 bp, Homo sapiens
tggagctggatccggcagcccccagggaagggactggagtggattgggtat

SEQ ID NO: 9619 - DNA, 51 bp, Homo sapiens
ttagcctggtttcagcagaaaccagggaaagcccctaagtccctgatctat

SEQ ID NO: 9620 - DNA, 51 bp, Homo sapiens; identical to SEQ ID NO: 5953

SEQ ID NO: 9621 - DNA, 51 bp, Homo sapiens; identical to SEQ ID NO: 1638

SEQ ID NO: 9622 - DNA, 51 bp, Homo sapiens
atgcactgggtccggcaagctccagggaagggcctggagtgggtcgcaggt

SEQ ID NO: 9623 - DNA, 51 bp, Homo sapiens
ttggcctggtaccagcagaaacctggccaggctcccaggctcctcatctat

SEQ ID NO: 9624 - DNA, 51 bp, Homo sapiens
atcagctgggtgcgacaggcccctggacaaggtcttgagtggatgggaggg

SEQ ID NO: 9625 - DNA, 51 bp, Homo sapiens
ttggattggtacctgcagaagccagggcagtctccacagctcctgatctat

SEQ ID NO: 9626 - DNA, 51 bp, Homo sapiens
atgcactgggtccgccaggctccaggcaaggggctggagtgggtgacaatt

SEQ ID NO: 9627 - DNA, 51 bp, Homo sapiens; identical to SEQ ID NO: 9623

SEQ ID NO: 9628 - DNA, 51 bp, Homo sapiens; identical to SEQ ID NO: 1634

SEQ ID NO: 9629 - DNA, 51 bp, Homo sapiens
ttaaattggtatcagcagaaaccagggaaagcccctaaactcctgatctat

SEQ ID NO: 9630 - DNA, 51 bp, Homo sapiens; identical to SEQ ID NO: 5968

SEQ ID NO: 9631 - DNA, 51 bp, Homo sapiens; identical to SEQ ID NO: 9623

SEQ ID NO: 9632 - DNA, 51 bp, Homo sapiens; identical to SEQ ID NO: 5917

SEQ ID NO: 9633 - DNA, 51 bp, Homo sapiens; identical to SEQ ID NO: 9625

SEQ ID NO: 9634 - DNA, 51 bp, Homo sapiens; identical to SEQ ID NO: 9592

SEQ ID NO: 9635 - DNA, 51 bp, Homo sapiens; identical to SEQ ID NO: 9625

SEQ ID NO: 9636 - DNA, 51 bp, Homo sapiens
atgagctgggtccgccaggctccggggaaggggctggagtgggtggcctac

SEQ ID NO: 9637 - DNA, 51 bp, Homo sapiens; identical to SEQ ID NO: 1554

SEQ ID NO: 9638 - DNA, 51 bp, Homo sapiens; identical to SEQ ID NO: 1584

SEQ ID NO: 9639 - DNA, 51 bp, Homo sapiens; identical to SEQ ID NO: 1584

SEQ ID NO: 9640 - DNA, 51 bp, Homo sapiens; identical to SEQ ID NO: 5953

SEQ ID NO: 9641 - DNA, 51 bp, Homo sapiens
ttagcctggtatcagcagaaaccagggaaagttcctaagctcctgatctat

SEQ ID NO: 9642 - DNA, 51 bp, Homo sapiens
atgaactgggtccgccaggctccagggaagggcctggagtgggttggccgt

SEQ ID NO: 9643 - DNA, 51 bp, Homo sapiens
ttggcctggtatcagcagaaaccagggaaagcccctaagctcctaatctat

SEQ ID NO: 9644 - DNA, 51 bp, Homo sapiens
atacactgggtccgccaggctccaggcaaggggctggagtgggtggcagtt

SEQ ID NO: 9645 - DNA, 51 bp, Homo sapiens
ctagcctggtaccagcagaaacctggccaggctcccaggctcctcatctat

SEQ ID NO: 9646 - DNA, 51 bp, Homo sapiens
ttaaattggtatcagcagaaaccagggaaagcccctaagctcctgatctac

SEQ ID NO: 9647 - DNA, 51 bp, Homo sapiens; identical to SEQ ID NO: 1554

SEQ ID NO: 9648 - DNA, 24 bp, Homo sapiens
atgaaccaagatggaagtgataat

SEQ ID NO: 9649 - DNA, 30 bp, Homo sapiens
attagaaacaaagctaacagttttatcaca

SEQ ID NO: 9650 - DNA, 21 bp, Homo sapiens
atgtctcatagtgggcggacc

SEQ ID NO: 9651 - DNA, 24 bp, Homo sapiens
atcaggcaagatgggggtgagaga

SEQ ID NO: 9652 - DNA, 24 bp, Homo sapiens
cttagccgcgatggtgctgacaca

SEQ ID NO: 9653 - DNA, 24 bp, Homo sapiens
ataaagcaagatggaagtgagaag

SEQ ID NO: 9654 - DNA, 24 bp, Homo sapiens
ataaagaaggatggaagtgagaca

SEQ ID NO: 9655 - DNA, 24 bp, Homo sapiens
agcaacgctggcagtggtgccaca

SEQ ID NO: 9656 - DNA, 24 bp, Homo sapiens
attgatcctcgtgactcttatagc

SEQ ID NO: 9657 - DNA, 21 bp, Homo sapiens
atgcaccatagtgggagtgcc

SEQ ID NO: 9658 - DNA, 24 bp, Homo sapiens
atcatcggtatgtttgggacaaca

SEQ ID NO: 9659 - DNA, 24 bp, Homo sapiens
ataaaccgagatggaagtgagaaa

SEQ ID NO: 9660 - DNA, 30 bp, Homo sapiens
tttaaaagcaaaagtggtggtgggacaaca

SEQ ID NO: 9661 - DNA, 24 bp, Homo sapiens
atcgtcgttggtagtggtaacaca

SEQ ID NO: 9662 - DNA, 24 bp, Homo sapiens
atccatcctggtgactctgatacc

SEQ ID NO: 9663 - DNA, 24 bp, Homo sapiens
ataaaccaagatggaagtgagaaa

SEQ ID NO: 9664 - DNA, 24 bp, Homo sapiens
attagttggaatagtgttcacata

SEQ ID NO: 9665 - DNA, 24 bp, Homo sapiens
ataaaccctaatactggtgagaca

SEQ ID NO: 9666 - DNA, 24 bp, Homo sapiens
attactactgatagcactacgaag

SEQ ID NO: 9667 - DNA, 24 bp, Homo sapiens
atttcatatgatggaagtcataca

SEQ ID NO: 9668 - DNA, 21 bp, Homo sapiens
accaaaactagtggacacacc

SEQ ID NO: 9669 - DNA, 24 bp, Homo sapiens
attagtactagtggttccatcagg

SEQ ID NO: 9670 - DNA, 21 bp, Homo sapiens
atttgtaatagaggggagtcg

SEQ ID NO: 9671 - DNA, 24 bp, Homo sapiens
attagtggcagtggtgatagtaca

SEQ ID NO: 9672 - DNA, 24 bp, Homo sapiens
attagcagtagcggtactatcata

SEQ ID NO: 9673 - DNA, 21 bp, Homo sapiens
atctattacagtgggagcacc

SEQ ID NO: 9674 - DNA, 24 bp, Homo sapiens
atcaaccctaacagtggtggcaca

SEQ ID NO: 9675 - DNA, 24 bp, Homo sapiens
attagttggaatagtggtagcata

SEQ ID NO: 9676 - DNA, 24 bp, Homo sapiens
atcatccctatctttggtacagca

SEQ ID NO: 9677 - DNA, 24 bp, Homo sapiens
atatcatatgatggaagtaataaa

SEQ ID NO: 9678 - DNA, 24 bp, Homo sapiens
atatcatatgatggaagtaataaa

SEQ ID NO: 9679 - DNA, 24 bp, Homo sapiens
attagtagtagtggtagtaccata

SEQ ID NO: 9680 - DNA, 24 bp, Homo sapiens
atcatccctatgtttggtgcagca

SEQ ID NO: 9681 - DNA, 30 bp, Homo sapiens
attaaaagcaaaactgatggtgggacaaca

SEQ ID NO: 9682 - DNA, 24 bp, Homo sapiens
ataaagcaagatggaagtgagaaa

SEQ ID NO: 9683 - DNA, 21 bp, Homo sapiens
atctattacagtgggagcacc

SEQ ID NO: 9684 - DNA, 21 bp, Homo sapiens
atctattacagtgggagcacc

SEQ ID NO: 9685 - DNA, 24 bp, Homo sapiens
atcaaccctaacagtggtggcaca

SEQ ID NO: 9686 - DNA, 30 bp, Homo sapiens
attaaaagcaatactgacggtgggacaaca

SEQ ID NO: 9687 - DNA, 24 bp, Homo sapiens
atatcatatgatggaagtaataaa

SEQ ID NO: 9688 - DNA, 114 bp, Homo sapiens; identical to SEQ ID NO: 6241

SEQ ID NO: 9689 - DNA, 108 bp, Homo sapiens
gagcgggactctggggtcccagacagattcagcggcagtgggtcaggcactgatttcaccctgaaaatcagcagggtggaggctgaggatgttggggtttattactgc

SEQ ID NO: 9690 - DNA, 114 bp, Homo sapiens
gaatacgccgcgtctgtgaaagacagattcagcatctcaagagatgactcaaagaattcactgtatctgcaaatgcacagcctgaagagcgaggacacggccatgtatttttgt

SEQ ID NO: 9691 - DNA, 108 bp, Homo sapiens
acccgcgaatccggggtccctgaccgattcagtggcaacgggtctgggacagatttcactctcaccatcagcagcctgcaggctgaagatgtggccgtttattactgt

SEQ ID NO: 9692 - DNA, 114 bp, Homo sapiens
tacaataatccgtcactcaagagtcgagtcatcatgtcagtagataggtccaagaaccagctctccctgatgttgacttctgtgaccgccgcagacacggccgtgtatttctgc

SEQ ID NO: 9693 - DNA, 108 bp, Homo sapiens
aatttggaaacgggggtcccatcaaggttcagtggaagtggatctgggacacatttcactttcaccatcagcagcctgcagccagaagatattggaacatattactgt

SEQ ID NO: 9694 - DNA, 114 bp, Homo sapiens
tattatgtgggctctgcgaggggccgattcaccatcgccagagacaacgccaacaactcactatatctccaaatgaacagcctgagagtcgaggacacggctgtttattattgt

SEQ ID NO: 9695 - DNA, 108 bp, Homo sapiens
aagcgggactctggggtcccagacagattcagcggcagtgggtcaggctctgatttcacactgaaaatcagcagggtggaggctgaggatgttggggtttattactgc

SEQ ID NO: 9696 - DNA, 114 bp, Homo sapiens
tcctacgcagactccgtgaagggtcgattaatcatctccagagacaattccaagaacacgctgtatctgcaaatccacaacctgaaagccgaagacacggccgtatattactgt

SEQ ID NO: 9697 - DNA, 108 bp, Homo sapiens
aacagggtcactggcatcccagccaggttcagtggcagtgggtctgggacagacttcactctcaccatcagcagcctagagcctgaagattttgcattttattactgt

SEQ ID NO: 9698 - DNA, 114 bp, Homo sapiens
tactatgtggactctgtgaggggccgattcaccttctccagagacaacgccaacaactcgctacttctgcagatgaacagcctgagagccgacgacacggctgtttattactgt

SEQ ID NO: 9699 - DNA, 108 bp, Homo sapiens
aagagggccactggcatcccagccaggttcagtggcagtgggtctgggacagacttcactctcaccatcagcagcctagagcctgaagattttgcagtttattactgt

SEQ ID NO: 9700 - DNA, 114 bp, Homo sapiens
aactatgtggactctgtgaagggccgattcaccatctccagagacaacgccaagaacgcactttatctgcaaatgaatagcctgagagtcgaggacacggcggtgtattactgt

SEQ ID NO: 9701 - DNA, 108 bp, Homo sapiens
gcgcgggaatccggtgtccctgaccgattcagtggcagcgggtctgggacagatttcactctcaccatcagcagcctgcaggctgaggatgtggcagtttattactgt

SEQ ID NO: 9702 - DNA, 114 bp, Homo sapiens
aaatattcacagaatttccagggcagactcaccattgtcagggacacatccgcgaacacagtcttcatggagctgagcagcctgacatctgaggacacggctgtatattactgt

SEQ ID NO: 9703 - DNA, 108 bp, Homo sapiens
acccgggaatccggggtccctgaccgattcagtggcagcgggtctgggacagatttcactctcaccatcagcagcctgcaggctgaagatgtggcagtttattactgt

SEQ ID NO: 9704 - DNA, 114 bp, Homo sapiens
aactacaacccgtccttcgaaggccacgtcactatgtcagttgacaagtccatcactactgcctacctgcagtggagtggcctgaaggcctcggacaccgccatttattactgt

SEQ ID NO: 9705 - DNA, 108 bp, Homo sapiens
agtttagaaagtggggtcccatcaaggttcagcggcagtggatctgggacagaattcactctcaccatcagcagcctgcagcctgatgattttgcaacttattactgc

SEQ ID NO: 9706 - DNA, 114 bp, Homo sapiens
ggctacaatccctccctcaagagtcgagtcgccttttcagtagacacgtccaagaatcagttctccctgagattgacctctgtgaccgctgcggacacggccatatattattgt

SEQ ID NO: 9707 - DNA, 108 bp, Homo sapiens
actttgcaaagtggggtcccatcaaggttcagcggccgtagatctgggacagaattcactctcaccatcagcagcctgcagcctgatgatcttgcaacttattactgc

SEQ ID NO: 9708 - DNA, 114 bp, Homo sapiens; identical to SEQ ID NO: 39

SEQ ID NO: 9709 - DNA, 108 bp, Homo sapiens
agcagggccactggcatcccagacaggttcagtggcagtgggtctgggacagacttcactctcaccatcagcagactggagcctgaagattttgcagtttattactgt

SEQ ID NO: 9710 - DNA, 114 bp, Homo sapiens
aactatgtggactctgtgaagggccgattctccatctccagagacagcgtcaggaactcattgtatctgcaaatgaacagcctgagagccgaggacacggctgtctattactgt

SEQ ID NO: 9711 - DNA, 108 bp, Homo sapiens
agtttgcagagtggagtcccatcaaagttcagcggcagtggatctgggacagacttcactctcaccatcagcaacctgcagcctgaagattttgcaacttattactgc

SEQ ID NO: 9712 - DNA, 114 bp, Homo sapiens
gactacgctgcacccgtgaagggcagatttaccatctcgagagatgattcaaagaacacgctgcatctacaaatgaacagtctgaaaaccgaggacacagccgtgtattactgt

SEQ ID NO: 9713 - DNA, 108 bp, Homo sapiens
aaccgggactccggggtcccagacagattcagcggcagtgggtcaggcactgatttcacactgaaaatcagcagggtggaggctgaggatgttggggtttattactgc

SEQ ID NO: 9714 - DNA, 114 bp, Homo sapiens
aattacgcacagaacttccaagacagagtcaccattaccagggacatgtccacaagcacagcctacatggagctgagcagcctgagatccgaggacacggccgtatattactgt

SEQ ID NO: 9715 - DNA, 108 bp, Homo sapiens
aatcgggcctccggggtccctgacaggttcagtggcagtggatcaggcacagattttacactggaaattagcagagtggaggctgaggatgttggggtctattactgc

SEQ ID NO: 9716 - DNA, 114 bp, Homo sapiens
acatacggcccgtccttccaaggccaggtcgccatctcagccgacaggtccatcagcaccgcctttctggagtggggcagtctgaaggcctcggacaccgccatgtattactgt

SEQ ID NO: 9717 - DNA, 108 bp, Homo sapiens
actttgcaaagtggggtcccagcgaggttcagcggcagtggatcggggacagaattcactctcacaatcagccgcctgcagcctgaagattttgcaactttttactgt

SEQ ID NO: 9718 - DNA, 114 bp, Homo sapiens
aactatgtggactctgtggagggccgattcaccatctctagagacaacgccaagaactcactatatttgcaaatgaacagcctgagagccgaagacacggctgtgtatcactgt

SEQ ID NO: 9719 - DNA, 108 bp, Homo sapiens
atcagggccactggcatcccagccaggttcagtggcagtgggtctgggacagacttcactctcaccatcagcagcctagagcctgaagattgtgcagtttactactgt

SEQ ID NO: 9720 - DNA, 114 bp, Homo sapiens
gcctatgcggactctgtaaagggccgattcaccatctccagagacaatgccaaggactccctgtatctgcagatgaacagtctgagacctgacgacacggccttgtatttctgt

SEQ ID NO: 9721 - DNA, 108 bp, Homo sapiens
cgtttacagagtggggtcccatcaaggttcagcggcagtggatctgggacagaattcactctcaccatcagcagcctgcagcctgatgattttgcaacttattactgc

SEQ ID NO: 9722 - DNA, 114 bp, Homo sapiens
aactatgcacagaggttccagggcagcgtcaccatgaccagggacacgtccatcaatacaggatacatggagttgagacggctgtcattagacgacacggccgtctattattgt

SEQ ID NO: 9723 - DNA, 108 bp, Homo sapiens
actttgcaaagtggggtcccatcgaggttcagtggcagtggatccgggacaggattcactctcaccatcagcagtctgcaacctgatgattctgcaacttactactgt

SEQ ID NO: 9724 - DNA, 114 bp, Homo sapiens
acctatgcagactctgtcaagggccgattcaccatctccagagacaatgccgggagttcattgcacctgcaaatgaacgacctgagagacgaggacacggctgtgtatttctgt

SEQ ID NO: 9725 - DNA, 108 bp, Homo sapiens
aatagggccactggcatcccaaataggttcagtggcagtgggtctgggacagacttcactctcaccatcagcagactggagcctgaagactttgcagtttattactgt

SEQ ID NO: 9726 - DNA, 114 bp, Homo sapiens
tactatggagactccgtgaggggccgattcaccatctccagagacaattccaagaacacgctgtatctgcaagtgaacagcctgagacctgaggacacggctgtttattactgt

SEQ ID NO: 9727 - DNA, 108 bp, Homo sapiens
actttagaaagtggggtcccatcaaggttcagcggcagtggctctgggacagaattcactctcaccatcagcagcctgcagcctgaagattttgcaacttattactgc

SEQ ID NO: 9728 - DNA, 114 bp, Homo sapiens
tggtacaacccgtccctcgagagtcgagtcaccatttccatggacacgtccaagaaccagatctccctgaatctgaggtctgtgaccgccgcagacacggctatatattactgt

SEQ ID NO: 9729 - DNA, 108 bp, Homo sapiens
agcagggccactggtgtcccagccaggttcagtggcagtgggtctggtagagagttcactctcaccatcaacagcctgcagtctgaagattttgcagtttactactgt

SEQ ID NO: 9730 - DNA, 114 bp, Homo sapiens
tactacgcagactctgtgaagggccgattcaccgtctccagagacaatgccaagaactcactttatctgcaaatggacagcctgagagacgaggacacggctctctactactgt

SEQ ID NO: 9731 - DNA, 108 bp, Homo sapiens
agtttgcaaagtggcgtcccctcaaggttcagcggcagtggatctgggacagacttcactttcaccatcagcagcctgcagcctgaagattttggaacttatttctgc

SEQ ID NO: 9732 - DNA, 114 bp, Homo sapiens
aactacactccgaccctcaagagtcgcctcgccatctccgcggacacatccaggaaccaggtctccctgaggctgacctcggtaactgacgccgacacggctgtttattattgt

SEQ ID NO: 9733 - DNA, 108 bp, Homo sapiens; identical to SEQ ID NO: 9719

SEQ ID NO: 9734 - DNA, 114 bp, Homo sapiens
tacgacgcagactatgtgaagggccggttcaccatctccagagacaattcgaagaacacgctgtatttggaaatgaacagcctgactgccgaggacacggccgtatattactgt

SEQ ID NO: 9735 - DNA, 108 bp, Homo sapiens
aacagggccactggcatcccagccaggttcagtggcagtgggtctgggacagacttcactctcaccatcagcagcctagagcctgaagattttgcagtttattactgt

SEQ ID NO: 9736 - DNA, 114 bp, Homo sapiens
ttctacgcagactctgtgaagggccgattcatcgtctccagggacaacgccaagaactccttgtttttagagatgaacagcctgagagacgaggacacgggccgatattactgt

SEQ ID NO: 9737 - DNA, 108 bp, Homo sapiens
aacttacagacaggggtcccatcaaggttcagtggaagtggatttgggacagattttactttcaccatcagcagcctgcagcctgaagattttgctacatattactgt

SEQ ID NO: 9738 - DNA, 114 bp, Homo sapiens
aactacaacccctccctcaagagtcgagtcaccatatcagtagacacgtccaagaaccagttctccctgaagctgagctctgtgaccgctgcggacacggccgtgtattactgt

SEQ ID NO: 9739 - DNA, 108 bp, Homo sapiens
agtttgcaaagtggggtcccatcaaagttcagcggcagtggatctgggacagatttcactctcaccatcagcagcctgcagcctgaagattttgcaacttattactgc

SEQ ID NO: 9740 - DNA, 114 bp, Homo sapiens; identical to SEQ ID NO: 6370

SEQ ID NO: 9741 - DNA, 108 bp, Homo sapiens; identical to SEQ ID NO: 1769

SEQ ID NO: 9742 - DNA, 114 bp, Homo sapiens
ggctatgcggactctgtgaagggccgattcaccatctccagagacaacgccaagaactccctgtttctgcaaatgaacagtctgagagctgaggacacggccttgtattcctgt

SEQ ID NO: 9743 - DNA, 108 bp, Homo sapiens; identical to SEQ ID NO: 1723

SEQ ID NO: 9744 - DNA, 114 bp, Homo sapiens
aactacgcacagaagttccagggcagagtcacgattaccgcggacgaatccacgagcacagcctacatggagctgagcagcctgagatctgaggacacggccgtgtattactgt

SEQ ID NO: 9745 - DNA, 108 bp, Homo sapiens
aatcgggcctccggggtccctgacaggttcagtggcagtggatcaggcacagattttacactgaaaatcagcagagtggaggctgaggatgttggggtttattactgc

SEQ ID NO: 9746 - DNA, 114 bp, Homo sapiens
tactacgcagactccgtgaagggccgattcaccatctccagagacaattccaagaacacgctgtatctgcaaatgaacagcctgagagctgaggacacggctgtgtattactgt

SEQ ID NO: 9747 - DNA, 108 bp, Homo sapiens; identical to SEQ ID NO: 1723

SEQ ID NO: 9748 - DNA, 114 bp, Homo sapiens
tactatgcagactccgtgaagggccgattcaccatctccagagacaattccaagaacacgctgtatctgcaaatgaacagcctgagagctgaggacacggctgtatattactgt

SEQ ID NO: 9749 - DNA, 108 bp, Homo sapiens; identical to SEQ ID NO: 1769

SEQ ID NO: 9750 - DNA, 114 bp, Homo sapiens; identical to SEQ ID NO: 6376

SEQ ID NO: 9751 - DNA, 108 bp, Homo sapiens; identical to SEQ ID NO: 1723

SEQ ID NO: 9752 - DNA, 114 bp, Homo sapiens; identical to SEQ ID NO: 9744

SEQ ID NO: 9753 - DNA, 108 bp, Homo sapiens; identical to SEQ ID NO: 9745

SEQ ID NO: 9754 - DNA, 114 bp, Homo sapiens
gactacgctgcacccgtgaaaggcagattcaccatctcaagagatgattcaaaaaacacgctgtatctgcaaatgaacagcctgaaaaccgaggacacagccgtgtattactgt

SEQ ID NO: 9755 - DNA, 108 bp, Homo sapiens; identical to SEQ ID NO: 9745

SEQ ID NO: 9756 - DNA, 114 bp, Homo sapiens; identical to SEQ ID NO: 6381

SEQ ID NO: 9757 - DNA, 108 bp, Homo sapiens; identical to SEQ ID NO: 1723

SEQ ID NO: 9758 - DNA, 114 bp, Homo sapiens; identical to SEQ ID NO: 6368

SEQ ID NO: 9759 - DNA, 114 bp, Homo sapiens; identical to SEQ ID NO: 6368

SEQ ID NO: 9760 - DNA, 114 bp, Homo sapiens; identical to SEQ ID NO: 6370

SEQ ID NO: 9761 - DNA, 108 bp, Homo sapiens
actttgcaatcaggggtcccatctcggttcagtggcagtggatctgggacagatttcactctcaccatcagcagcctgcagcctgaagatgttgcaacttattactgt

SEQ ID NO: 9762 - DNA, 114 bp, Homo sapiens
gactacgctgcacccgtgaaaggcagattcaccatctcaagagatgattcaaaatacacgctgtttttgcagatgaacaggctgcagaccgaggacacagccgtctattattgt

SEQ ID NO: 9763 - DNA, 108 bp, Homo sapiens
aattttgcaagtggggtcccatcaaggttcagcggcagtggatctgggacagaattcactctcaccatcagcagcctgcagcctgacgattttgcaagttattactgc

SEQ ID NO: 9764 - DNA, 114 bp, Homo sapiens
tactatgcagactccgtgaagggccgattcaccatctccagagacaattccaagaacacgctgtatctgcaaatgaacagcctgagagctgaggacacggctatgtattactgt

SEQ ID NO: 9765 - DNA, 108 bp, Homo sapiens; identical to SEQ ID NO: 1723

SEQ ID NO: 9766 - DNA, 108 bp, Homo sapiens
aatttggaaacaggggtcccatcaaggttcagtggaagtggatctgggacagattttactttcaccatcagcagcctgcagcctgaagatattgcaacatattactgt

SEQ ID NO: 9767 - DNA, 108 bp, Homo sapiens; identical to SEQ ID NO: 1696

SEQ ID NO: 9768 - DNA, 30 bp, Homo sapiens; identical to SEQ ID NO: 1788

SEQ ID NO: 9769 - DNA, 27 bp, Homo sapiens
ttgcaaggtacacactggcctcgaacg

SEQ ID NO: 9770 - DNA, 54 bp, Homo sapiens
actagagattttttggagtggtcccgcccttactactaccacttcatggacgtc

SEQ ID NO: 9771 - DNA, 27 bp, Homo sapiens
cagcagtattatactactcctccgacg

SEQ ID NO: 9772 - DNA, 30 bp, Homo sapiens
gccagagccgctcgagggcgtttgaatatc

SEQ ID NO: 9773 - DNA, 33 bp, Homo sapiens
caacagtatgataatctgcctcccatattcact

SEQ ID NO: 9774 - DNA, 33 bp, Homo sapiens
acgagagattctggcattactcgttttgattat

SEQ ID NO: 9775 - DNA, 27 bp, Homo sapiens
atgcaaggtacacactggcctccggcc

SEQ ID NO: 9776 - DNA, 66 bp, Homo sapiens
gcgaaatccctcttctccggcactgtggatgataataatggtttttactttgatgcttttgatatc

SEQ ID NO: 9777 - DNA, 33 bp, Homo sapiens
cagcagcggagtaactggcccccgacgctcact

SEQ ID NO: 9778 - DNA, 30 bp, Homo sapiens
gcgagaacctcctcggcctactttgactac

SEQ ID NO: 9779 - DNA, 27 bp, Homo sapiens
cagcagcgtagcaactggcctcagacg

SEQ ID NO: 9780 - DNA, 30 bp, Homo sapiens
gcgaaagatgcctacagcgttcctgactac

SEQ ID NO: 9781 - DNA, 27 bp, Homo sapiens
cagcattattatactgaacctgagacg

SEQ ID NO: 9782 - DNA, 45 bp, Homo sapiens
gcgagaccagtgagaaacggcatagcacctagtgctatcgaatac

SEQ ID NO: 9783 - DNA, 24 bp, Homo sapiens
cagcaatattataatacgatcact

SEQ ID NO: 9784 - DNA, 39 bp, Homo sapiens
gcgagagccgcaggtggtacgttgggctggttcgacccc

SEQ ID NO: 9785 - DNA, 27 bp, Homo sapiens
caacagtataatagttatccccgaacg

SEQ ID NO: 9786 - DNA, 57 bp, Homo sapiens
gcgacctccaacctagactatatgattggctgggcccaccggggcgcttttaatatc

SEQ ID NO: 9787 - DNA, 27 bp, Homo sapiens
caacagtataatagttatcttttcact

SEQ ID NO: 9788 - DNA, 54 bp, Homo sapiens; identical to SEQ ID NO: 40

SEQ ID NO: 9789 - DNA, 30 bp, Homo sapiens
cagcagtatggtagctcacctccggcaacg

SEQ ID NO: 9790 - DNA, 48 bp, Homo sapiens
gcgacagataggtatgaaggcaaatggtccgtggatcgatttaactac

SEQ ID NO: 9791 - DNA, 27 bp, Homo sapiens
caacagtataatagttacccgctcact

SEQ ID NO: 9792 - DNA, 24 bp, Homo sapiens
atcgccgactggcaccctgaatac

SEQ ID NO: 9793 - DNA, 30 bp, Homo sapiens
atgcagactgcactctggcctccgaacact

SEQ ID NO: 9794 - DNA, 45 bp, Homo sapiens
gcggcatattttggtggcagcgcgtccaattacggtttggacgtc

SEQ ID NO: 9795 - DNA, 27 bp, Homo sapiens
atgcaagcttcacaaactcctcagact

SEQ ID NO: 9796 - DNA, 45 bp, Homo sapiens
gcgaggcccaagtatagcagcagctcttacagtggttttgatgtc

SEQ ID NO: 9797 - DNA, 27 bp, Homo sapiens
caacagcttcatagttcccctctcact

SEQ ID NO: 9798 - DNA, 27 bp, Homo sapiens
gcgccagagacgtattactttgaccac

SEQ ID NO: 9799 - DNA, 24 bp, Homo sapiens
cagcagcgtagtcagttagtcact

SEQ ID NO: 9800 - DNA, 63 bp, Homo sapiens
gcaaaagatataaatacggcccaatattgtaatattgtcaattgctatggggaatttgactac

SEQ ID NO: 9801 - DNA, 24 bp, Homo sapiens
caacaatatgatacttatcccacc

SEQ ID NO: 9802 - DNA, 75 bp, Homo sapiens
gcgagagggggttatcaggacagtacaggttatcactacgatgacgatgggccccgctactacggtttggacgac

SEQ ID NO: 9803 - DNA, 27 bp, Homo sapiens
caacagagttacactcccttgatcacg

SEQ ID NO: 9804 - DNA, 72 bp, Homo sapiens
gcgcgagatccgacgccagtggctggcagggtccgacgcgcgataagcgactaccaatacgccatggacgtc

SEQ ID NO: 9805 - DNA, 30 bp, Homo sapiens
cagcactatggtgcttcacccctatataat

SEQ ID NO: 9806 - DNA, 45 bp, Homo sapiens
gcgaaagatgctgatactactggctattatgatccttttgactac

SEQ ID NO: 9807 - DNA, 24 bp, Homo sapiens
caacaatatcatgaatatcacagt

SEQ ID NO: 9808 - DNA, 60 bp, Homo sapiens
gcgactcgaggggtggaggactgtagtggtatcgactgctctttatactatatggaagtc

SEQ ID NO: 9809 - DNA, 27 bp, Homo sapiens
cagaagtatgataactggcccgtcact

SEQ ID NO: 9810 - DNA, 42 bp, Homo sapiens
gcgagagtggccgggagaggctacagagactacacggacttc

SEQ ID NO: 9811 - DNA, 27 bp, Homo sapiens
caacaatataatagttaccctcgaact

SEQ ID NO: 9812 - DNA, 36 bp, Homo sapiens
gcgagatcttcacgctccttcggtgactatggcgac

SEQ ID NO: 9813 - DNA, 24 bp, Homo sapiens
cagcagcgtagtcagttagtcact

SEQ ID NO: 9814 - DNA, 42 bp, Homo sapiens
gcgaaggactccgtgtttaactttggttcccgagatgaccac

SEQ ID NO: 9815 - DNA, 27 bp, Homo sapiens
caccagcgttacaactggcctcgaacg

SEQ ID NO: 9816 - DNA, 33 bp, Homo sapiens
gcgagaagcacggtgattatgcccccggacgtc

SEQ ID NO: 9817 - DNA, 27 bp, Homo sapiens
caacaaaatcataatgtcctcttcaat

SEQ ID NO: 9818 - DNA, 27 bp, Homo sapiens
gcgagaggggggtcggggagttatggg

SEQ ID NO: 9819 - DNA, 27 bp, Homo sapiens
caacagtataatagttaccctcccact

SEQ ID NO: 9820 - DNA, 51 bp, Homo sapiens
gcgagagccaactctgatcgttattactatgatagtagtggttatagctac

SEQ ID NO: 9821 - DNA, 27 bp, Homo sapiens
caacagagttacagtacccccatcacc

SEQ ID NO: 9822 - DNA, 48 bp, Homo sapiens
gcaaaagcgggtatagcagcagctggtaccaattacgcttttgatatc

SEQ ID NO: 9823 - DNA, 33 bp, Homo sapiens
cagcagtataataactggcctcctccggtcacc

SEQ ID NO: 9824 - DNA, 57 bp, Homo sapiens
gcgagagtagtagatatagcagctcgtccggagggctactactactacatggacgtc

SEQ ID NO: 9825 - DNA, 24 bp, Homo sapiens
atgcaagctctacaaacgtggacg

SEQ ID NO: 9826 - DNA, 51 bp, Homo sapiens
gcgaggggcctagggttggagtggaggttatcaccggggtactttgactac

SEQ ID NO: 9827 - DNA, 27 bp, Homo sapiens
cagcagtataataactggccggggact

SEQ ID NO: 9828 - DNA, 39 bp, Homo sapiens; identical to SEQ ID NO: 6636

SEQ ID NO: 9829 - DNA, 27 bp, Homo sapiens
caacagagttacagtactccgctcact

SEQ ID NO: 9830 - DNA, 45 bp, Homo sapiens; identical to SEQ ID NO: 6608

SEQ ID NO: 9831 - DNA, 30 bp, Homo sapiens
cagcagtataataactggcctccgtggacg

SEQ ID NO: 9832 - DNA, 51 bp, Homo sapiens
gcgagagcccggacggtcgggttcggggagtccgcctactacatggacgtc

SEQ ID NO: 9833 - DNA, 24 bp, Homo sapiens
atgcaagctctacacccgtgcagt

SEQ ID NO: 9834 - DNA, 45 bp, Homo sapiens
accacagatagatggggttcttcatactactactacatggacgtc

SEQ ID NO: 9835 - DNA, 27 bp, Homo sapiens
atgcaagctctacaaactacgtggacg

SEQ ID NO: 9836 - DNA, 45 bp, Homo sapiens
gcgagagatgccgatagcagtggctggtacgcccactttgactac

SEQ ID NO: 9837 - DNA, 30 bp, Homo sapiens; identical to SEQ ID NO: 9831

SEQ ID NO: 9838 - DNA, 48 bp, Homo sapiens
gcgagaaatccggacgtatacgattttggctcaaactggttcgacccc

SEQ ID NO: 9839 - DNA, 54 bp, Homo sapiens; identical to SEQ ID NO: 6574

SEQ ID NO: 9840 - DNA, 48 bp, Homo sapiens
gcgagaggcctccatagcagctctgactactactacggtatggacgtc

SEQ ID NO: 9841 - DNA, 27 bp, Homo sapiens
caaaagtataacagtgccccattcacc

SEQ ID NO: 9842 - DNA, 30 bp, Homo sapiens
accacagacccatatccgacctttggctac

SEQ ID NO: 9843 - DNA, 27 bp, Homo sapiens
caacagtataatagttattggtggacg

SEQ ID NO: 9844 - DNA, 51 bp, Homo sapiens
gcgaaagactacacgccttacgctttggagtggttaccattatttgactac

SEQ ID NO: 9845 - DNA, 30 bp, Homo sapiens
cagcagtataataagtggcctccgctcact

SEQ ID NO: 9846 - DNA, 27 bp, Homo sapiens
caacagtatgataatctcccgctcact

SEQ ID NO: 9847 - DNA, 24 bp, Homo sapiens
cagcagtatggtagctcagggacg

SEQ ID NO: 9848 - DNA, 36 bp, Homo sapiens; identical to SEQ ID NO: 1879

SEQ ID NO: 9849 - DNA, 33 bp, Homo sapiens
tgcttgcaaggtacacactggcctcgaacgttc

SEQ ID NO: 9850 - DNA, 60 bp, Homo sapiens
tgtactagagattttttggagtggtcccgcccttactactaccacttcatggacgtctgg

SEQ ID NO: 9851 - DNA, 33 bp, Homo sapiens
tgtcagcagtattatactactcctccgacgttc

SEQ ID NO: 9852 - DNA, 36 bp, Homo sapiens
tgcgccagagccgctcgagggcgtttgaatatctgg

SEQ ID NO: 9853 - DNA, 39 bp, Homo sapiens
tgtcaacagtatgataatctgcctcccatattcactttc

SEQ ID NO: 9854 - DNA, 39 bp, Homo sapiens
tgtacgagagattctggcattactcgttttgattattgg

SEQ ID NO: 9855 - DNA, 33 bp, Homo sapiens
tgcatgcaaggtacacactggcctccggccttc

SEQ ID NO: 9856 - DNA, 72 bp, Homo sapiens
tgtgcgaaatccctcttctccggcactgtggatgataataatggtttttactttgatgcttttgatatctgg

SEQ ID NO: 9857 - DNA, 39 bp, Homo sapiens
tgtcagcagcggagtaactggcccccgacgctcactttc

SEQ ID NO: 9858 - DNA, 36 bp, Homo sapiens
tgtgcgagaacctcctcggcctactttgactactgg

SEQ ID NO: 9859 - DNA, 33 bp, Homo sapiens
tgtcagcagcgtagcaactggcctcagacgttc

SEQ ID NO: 9860 - DNA, 36 bp, Homo sapiens
tgtgcgaaagatgcctacagcgttcctgactactgg

SEQ ID NO: 9861 - DNA, 33 bp, Homo sapiens
tgtcagcattattatactgaacctgagacgttc

SEQ ID NO: 9862 - DNA, 51 bp, Homo sapiens
tgtgcgagaccagtgagaaacggcatagcacctagtgctatcgaatactgg

SEQ ID NO: 9863 - DNA, 30 bp, Homo sapiens
tgtcagcaatattataatacgatcactttc

SEQ ID NO: 9864 - DNA, 45 bp, Homo sapiens
tgtgcgagagccgcaggtggtacgttgggctggttcgacccctgg

SEQ ID NO: 9865 - DNA, 33 bp, Homo sapiens
tgccaacagtataatagttatccccgaacgttc

SEQ ID NO: 9866 - DNA, 63 bp, Homo sapiens
tgtgcgacctccaacctagactatatgattggctgggcccaccggggcgcttttaatatctgg

SEQ ID NO: 9867 - DNA, 33 bp, Homo sapiens
tgccaacagtataatagttatcttttcactttc

SEQ ID NO: 9868 - DNA, 60 bp, Homo sapiens; identical to SEQ ID NO: 41

SEQ ID NO: 9869 - DNA, 36 bp, Homo sapiens
tgtcagcagtatggtagctcacctccggcaacgttc

SEQ ID NO: 9870 - DNA, 54 bp, Homo sapiens
tgtgcgacagataggtatgaaggcaaatggtccgtggatcgatttaactactgg

SEQ ID NO: 9871 - DNA, 33 bp, Homo sapiens
tgccaacagtataatagttacccgctcactttc

SEQ ID NO: 9872 - DNA, 30 bp, Homo sapiens
tgtatcgccgactggcaccctgaatactgg

SEQ ID NO: 9873 - DNA, 36 bp, Homo sapiens
tgcatgcagactgcactctggcctccgaacactttt

SEQ ID NO: 9874 - DNA, 51 bp, Homo sapiens
tgtgcggcatattttggtggcagcgcgtccaattacggtttggacgtctgg

SEQ ID NO: 9875 - DNA, 33 bp, Homo sapiens
tgcatgcaagcttcacaaactcctcagactttc

SEQ ID NO: 9876 - DNA, 51 bp, Homo sapiens
tgtgcgaggcccaagtatagcagcagctcttacagtggttttgatgtctgg

SEQ ID NO: 9877 - DNA, 33 bp, Homo sapiens
tgtcaacagcttcatagttcccctctcactttc

SEQ ID NO: 9878 - DNA, 33 bp, Homo sapiens
tgtgcgccagagacgtattactttgaccactgg

SEQ ID NO: 9879 - DNA, 30 bp, Homo sapiens
tgtcagcagcgtagtcagttagtcactttc

SEQ ID NO: 9880 - DNA, 69 bp, Homo sapiens
tgtgcaaaagatataaatacggcccaatattgtaatattgtcaattgctatggggaatttgactactgg

SEQ ID NO: 9881 - DNA, 30 bp, Homo sapiens
tgccaacaatatgatacttatcccaccttc

SEQ ID NO: 9882 - DNA, 81 bp, Homo sapiens
tgtgcgagagggggttatcaggacagtacaggttatcactacgatgacgatgggccccgctactacggtttggacgactgg

SEQ ID NO: 9883 - DNA, 33 bp, Homo sapiens
tgtcaacagagttacactcccttgatcacgttc

SEQ ID NO: 9884 - DNA, 78 bp, Homo sapiens
tgtgcgcgagatccgacgccagtggctggcagggtccgacgcgcgataagcgactaccaatacgccatggacgtctgg

SEQ ID NO: 9885 - DNA, 36 bp, Homo sapiens
tgtcagcactatggtgcttcacccctatataatttt

SEQ ID NO: 9886 - DNA, 51 bp, Homo sapiens
tgtgcgaaagatgctgatactactggctattatgatccttttgactactgg

SEQ ID NO: 9887 - DNA, 30 bp, Homo sapiens
tgccaacaatatcatgaatatcacagtttt

SEQ ID NO: 9888 - DNA, 66 bp, Homo sapiens
tgtgcgactcgaggggtggaggactgtagtggtatcgactgctctttatactatatggaagtctgg

SEQ ID NO: 9889 - DNA, 33 bp, Homo sapiens
tgtcagaagtatgataactggcccgtcactttc

SEQ ID NO: 9890 - DNA, 48 bp, Homo sapiens
tgtgcgagagtggccgggagaggctacagagactacacggacttctgg

SEQ ID NO: 9891 - DNA, 33 bp, Homo sapiens
tgccaacaatataatagttaccctcgaactttt

SEQ ID NO: 9892 - DNA, 42 bp, Homo sapiens
tgtgcgagatcttcacgctccttcggtgactatggcgactgg

SEQ ID NO: 9893 - DNA, 30 bp, Homo sapiens; identical to SEQ ID NO: 9879

SEQ ID NO: 9894 - DNA, 48 bp, Homo sapiens
tgtgcgaaggactccgtgtttaactttggttcccgagatgaccactgg

SEQ ID NO: 9895 - DNA, 33 bp, Homo sapiens
tgtcaccagcgttacaactggcctcgaacgttc

SEQ ID NO: 9896 - DNA, 39 bp, Homo sapiens
tgtgcgagaagcacggtgattatgcccccggacgtctgg

SEQ ID NO: 9897 - DNA, 33 bp, Homo sapiens
tgtcaacaaaatcataatgtcctcttcaatttc

SEQ ID NO: 9898 - DNA, 33 bp, Homo sapiens
tgtgcgagaggggggtcggggagttatgggtgg

SEQ ID NO: 9899 - DNA, 33 bp, Homo sapiens
tgccaacagtataatagttaccctcccactttt

SEQ ID NO: 9900 - DNA, 57 bp, Homo sapiens
tgtgcgagagccaactctgatcgttattactatgatagtagtggttatagctactgg

SEQ ID NO: 9901 - DNA, 33 bp, Homo sapiens
tgtcaacagagttacagtacccccatcaccttc

SEQ ID NO: 9902 - DNA, 54 bp, Homo sapiens
tgtgcaaaagcgggtatagcagcagctggtaccaattacgcttttgatatctgg

SEQ ID NO: 9903 - DNA, 39 bp, Homo sapiens
tgtcagcagtataataactggcctcctccggtcaccttc

SEQ ID NO: 9904 - DNA, 63 bp, Homo sapiens
tgtgcgagagtagtagatatagcagctcgtccggagggctactactactacatggacgtctgg

SEQ ID NO: 9905 - DNA, 30 bp, Homo sapiens
tgcatgcaagctctacaaacgtggacgttc

SEQ ID NO: 9906 - DNA, 57 bp, Homo sapiens
tgtgcgaggggcctagggttggagtggaggttatcaccggggtactttgactactgg

SEQ ID NO: 9907 - DNA, 33 bp, Homo sapiens
tgtcagcagtataataactggccggggactttc

SEQ ID NO: 9908 - DNA, 45 bp, Homo sapiens; identical to SEQ ID NO: 6842

SEQ ID NO: 9909 - DNA, 33 bp, Homo sapiens
tgtcaacagagttacagtactccgctcactttc

SEQ ID NO: 9910 - DNA, 51 bp, Homo sapiens; identical to SEQ ID NO: 6814

SEQ ID NO: 9911 - DNA, 36 bp, Homo sapiens
tgtcagcagtataataactggcctccgtggacgttc

SEQ ID NO: 9912 - DNA, 57 bp, Homo sapiens
tgtgcgagagcccggacggtcgggttcggggagtccgcctactacatggacgtctgg

SEQ ID NO: 9913 - DNA, 30 bp, Homo sapiens
tgcatgcaagctctacacccgtgcagtttt

SEQ ID NO: 9914 - DNA, 51 bp, Homo sapiens
tgtaccacagatagatggggttcttcatactactactacatggacgtctgg

SEQ ID NO: 9915 - DNA, 33 bp, Homo sapiens
tgcatgcaagctctacaaactacgtggacgttc

SEQ ID NO: 9916 - DNA, 51 bp, Homo sapiens
tgtgcgagagatgccgatagcagtggctggtacgcccactttgactactgg

SEQ ID NO: 9917 - DNA, 36 bp, Homo sapiens; identical to SEQ ID NO: 9911

SEQ ID NO: 9918 - DNA, 54 bp, Homo sapiens
tgtgcgagaaatccggacgtatacgattttggctcaaactggttcgacccctgg

SEQ ID NO: 9919 - DNA, 60 bp, Homo sapiens; identical to SEQ ID NO: 6780

SEQ ID NO: 9920 - DNA, 54 bp, Homo sapiens
tgtgcgagaggcctccatagcagctctgactactactacggtatggacgtctgg

SEQ ID NO: 9921 - DNA, 33 bp, Homo sapiens
tgtcaaaagtataacagtgccccattcaccttc

SEQ ID NO: 9922 - DNA, 36 bp, Homo sapiens
tgtaccacagacccatatccgacctttggctactgg

SEQ ID NO: 9923 - DNA, 33 bp, Homo sapiens
tgccaacagtataatagttattggtggacgttc

SEQ ID NO: 9924 - DNA, 57 bp, Homo sapiens
tgtgcgaaagactacacgccttacgctttggagtggttaccattatttgactactgg

SEQ ID NO: 9925 - DNA, 36 bp, Homo sapiens
tgtcagcagtataataagtggcctccgctcactttc

SEQ ID NO: 9926 - DNA, 33 bp, Homo sapiens
tgtcaacagtatgataatctcccgctcactttc

SEQ ID NO: 9927 - DNA, 30 bp, Homo sapiens
tgtcagcagtatggtagctcagggacgttc

SEQ ID NO: 9928 - DNA, 11 bp, Homo sapiens
tgtgcgagaga

SEQ ID NO: 9929 - DNA, 25 bp, Homo sapiens
tgcttgcaaggtacacactggcctc

SEQ ID NO: 9930 - DNA, 11 bp, Homo sapiens
tgtactagaga

SEQ ID NO: 9931 - DNA, 26 bp, Homo sapiens
tgtcagcagtattatactactcctcc

SEQ ID NO: 9932 - DNA, 10 bp, Homo sapiens
tgcgccagag

SEQ ID NO: 9933 - DNA, 26 bp, Homo sapiens
tgtcaacagtatgataatctgcctcc

SEQ ID NO: 9934 - DNA, 11 bp, Homo sapiens
tgtacgagaga

SEQ ID NO: 9935 - DNA, 26 bp, Homo sapiens
tgcatgcaaggtacacactggcctcc

SEQ ID NO: 9936 - DNA, 26 bp, Homo sapiens
tgtcagcagcggagtaactggccccc

SEQ ID NO: 9937 - DNA, 25 bp, Homo sapiens
tgtcagcagcgtagcaactggcctc

SEQ ID NO: 9938 - DNA, 11 bp, Homo sapiens
tgtgcgaaaga

SEQ ID NO: 9939 - DNA, 24 bp, Homo sapiens
tgtcagcattattatactgaacct

SEQ ID NO: 9940 - DNA, 20 bp, Homo sapiens
tgtcagcaatattataatac

SEQ ID NO: 9941 - DNA, 21 bp, Homo sapiens
tgccaacagtataatagttat

SEQ ID NO: 9942 - DNA, 21 bp, Homo sapiens
tgccaacagtataatagttat

SEQ ID NO: 9943 - DNA, 26 bp, Homo sapiens
tgtcagcagtatggtagctcacctcc

SEQ ID NO: 9944 - DNA, 11 bp, Homo sapiens
tgtgcgacaga

SEQ ID NO: 9945 - DNA, 23 bp, Homo sapiens
tgccaacagtataatagttaccc

SEQ ID NO: 9946 - DNA, 26 bp, Homo sapiens
tgcatgcagactgcactctggcctcc

SEQ ID NO: 9947 - DNA, 25 bp, Homo sapiens
tgcatgcaagcttcacaaactcctc

SEQ ID NO: 9948 - DNA, 23 bp, Homo sapiens
tgtcaacagcttcatagttcccc

SEQ ID NO: 9949 - DNA, 11 bp, Homo sapiens
tgtgcgccaga

SEQ ID NO: 9950 - DNA, 14 bp, Homo sapiens
tgtcagcagcgtag

SEQ ID NO: 9951 - DNA, 13 bp, Homo sapiens
tgtgcaaaagata

SEQ ID NO: 9952 - DNA, 21 bp, Homo sapiens
tgccaacaatatgatacttat

SEQ ID NO: 9953 - DNA, 10 bp, Homo sapiens
tgtgcgagag

SEQ ID NO: 9954 - DNA, 21 bp, Homo sapiens
tgtcaacagagttacactccc

SEQ ID NO: 9955 - DNA, 11 bp, Homo sapiens
tgtgcgcgaga

SEQ ID NO: 9956 - DNA, 23 bp, Homo sapiens
tgtcagcactatggtgcttcacc

SEQ ID NO: 9957 - DNA, 11 bp, Homo sapiens
tgtgcgaaaga

SEQ ID NO: 9958 - DNA, 21 bp, Homo sapiens
tgccaacaatatcatgaatat

SEQ ID NO: 9959 - DNA, 23 bp, Homo sapiens
tgtcagaagtatgataactggcc

SEQ ID NO: 9960 - DNA, 10 bp, Homo sapiens
tgtgcgagag

SEQ ID NO: 9961 - DNA, 25 bp, Homo sapiens
tgccaacaatataatagttaccctc

SEQ ID NO: 9962 - DNA, 14 bp, Homo sapiens
tgtcagcagcgtag

SEQ ID NO: 9963 - DNA, 11 bp, Homo sapiens
tgtgcgaagga

SEQ ID NO: 9964 - DNA, 25 bp, Homo sapiens
tgtcaccagcgttacaactggcctc

SEQ ID NO: 9965 - DNA, 22 bp, Homo sapiens
tgtcaacaaaatcataatgtcc

SEQ ID NO: 9966 - DNA, 10 bp, Homo sapiens
tgtgcgagag

SEQ ID NO: 9967 - DNA, 26 bp, Homo sapiens
tgccaacagtataatagttaccctcc

SEQ ID NO: 9968 - DNA, 10 bp, Homo sapiens
tgtgcgagag

SEQ ID NO: 9969 - DNA, 23 bp, Homo sapiens
tgtcaacagagttacagtacccc

SEQ ID NO: 9970 - DNA, 10 bp, Homo sapiens
tgtgcaaaag

SEQ ID NO: 9971 - DNA, 26 bp, Homo sapiens
tgtcagcagtataataactggcctcc

SEQ ID NO: 9972 - DNA, 10 bp, Homo sapiens
tgtgcgagag

SEQ ID NO: 9973 - DNA, 20 bp, Homo sapiens
tgcatgcaagctctacaaac

SEQ ID NO: 9974 - DNA, 23 bp, Homo sapiens
tgtcagcagtataataactggcc

SEQ ID NO: 9975 - DNA, 11 bp, Homo sapiens
tgtgcgaaaga

SEQ ID NO: 9976 - DNA, 23 bp, Homo sapiens
tgtcaacagagttacagtactcc

SEQ ID NO: 9977 - DNA, 11 bp, Homo sapiens
tgtgcgagaga

SEQ ID NO: 9978 - DNA, 26 bp, Homo sapiens
tgtcagcagtataataactggcctcc

SEQ ID NO: 9979 - DNA, 10 bp, Homo sapiens
tgtgcgagag

SEQ ID NO: 9980 - DNA, 17 bp, Homo sapiens
tgcatgcaagctctaca

SEQ ID NO: 9981 - DNA, 11 bp, Homo sapiens
tgtaccacaga

SEQ ID NO: 9982 - DNA, 21 bp, Homo sapiens
tgcatgcaagctctacaaact

SEQ ID NO: 9983 - DNA, 11 bp, Homo sapiens
tgtgcgagaga

SEQ ID NO: 9984 - DNA, 26 bp, Homo sapiens
tgtcagcagtataataactggcctcc

SEQ ID NO: 9985 - DNA, 10 bp, Homo sapiens
tgtgcgagag

SEQ ID NO: 9986 - DNA, 10 bp, Homo sapiens
tgtgcgagag

SEQ ID NO: 9987 - DNA, 23 bp, Homo sapiens
tgtcaaaagtataacagtgcccc

SEQ ID NO: 9988 - DNA, 11 bp, Homo sapiens
tgtaccacaga

SEQ ID NO: 9989 - DNA, 22 bp, Homo sapiens
tgccaacagtataatagttatt

SEQ ID NO: 9990 - DNA, 11 bp, Homo sapiens
tgtgcgaaaga

SEQ ID NO: 9991 - DNA, 26 bp, Homo sapiens
tgtcagcagtataataagtggcctcc

SEQ ID NO: 9992 - DNA, 23 bp, Homo sapiens
tgtcaacagtatgataatctccc

SEQ ID NO: 9993 - DNA, 21 bp, Homo sapiens
tgtcagcagtatggtagctca

SEQ ID NO: 9994 - DNA, 16 bp, Homo sapiens
tttcgaccgtggtgca

SEQ ID NO: 9995 - DNA, 22 bp, Homo sapiens
ttttttggagtggtcccgccct

SEQ ID NO: 9996 - DNA, 13 bp, Homo sapiens
ccgctcgagggcg

SEQ ID NO: 9997 - DNA, 16 bp, Homo sapiens
ttctggcattactcgt

SEQ ID NO: 9998 - DNA, 44 bp, Homo sapiens
tccctcttctccggcactgtggatgataataatggtttttactt

SEQ ID NO: 9999 - DNA, 11 bp, Homo sapiens
acctcctcggc

SEQ ID NO: 10000 - DNA, 15 bp, Homo sapiens
tgcctacagcgttcc

SEQ ID NO: 10001 - DNA, 33 bp, Homo sapiens
ccagtgagaaacggcatagcacctagtgctatc

SEQ ID NO: 10002 - DNA, 20 bp, Homo sapiens
gccgcaggtggtacgttggg

SEQ ID NO: 10003 - DNA, 41 bp, Homo sapiens
cctccaacctagactatatgattggctgggcccaccggggc

SEQ ID NO: 10004 - DNA, 31 bp, Homo sapiens; identical to SEQ ID NO: 43

SEQ ID NO: 10005 - DNA, 31 bp, Homo sapiens
taggtatgaaggcaaatggtccgtggatcga

SEQ ID NO: 10006 - DNA, 16 bp, Homo sapiens
tcgccgactggcaccc

SEQ ID NO: 10007 - DNA, 24 bp, Homo sapiens
tattttggtggcagcgcgtccaat

SEQ ID NO: 10008 - DNA, 27 bp, Homo sapiens
gcccaagtatagcagcagctcttacag

SEQ ID NO: 10009 - DNA, 44 bp, Homo sapiens
taaatacggcccaatattgtaatattgtcaattgctatggggaa

SEQ ID NO: 10010 - DNA, 49 bp, Homo sapiens
ggggttatcaggacagtacaggttatcactacgatgacgatgggccccg

SEQ ID NO: 10011 - DNA, 49 bp, Homo sapiens
tccgacgccagtggctggcagggtccgacgcgcgataagcgactaccaa

SEQ ID NO: 10012 - DNA, 28 bp, Homo sapiens
tgctgatactactggctattatgatcct

SEQ ID NO: 10013 - DNA, 41 bp, Homo sapiens
ctcgaggggtggaggactgtagtggtatcgactgctcttta

SEQ ID NO: 10014 - DNA, 29 bp, Homo sapiens
tggccgggagaggctacagagactacacg

SEQ ID NO: 10015 - DNA, 23 bp, Homo sapiens
tcttcacgctccttcggtgacta

SEQ ID NO: 10016 - DNA, 27 bp, Homo sapiens
ctccgtgtttaactttggttcccgaga

SEQ ID NO: 10017 - DNA, 21 bp, Homo sapiens
agcacggtgattatgcccccg

SEQ ID NO: 10018 - DNA, 20 bp, Homo sapiens
gggggtcggggagttatggg

SEQ ID NO: 10019 - DNA, 40 bp, Homo sapiens
ccaactctgatcgttattactatgatagtagtggttatag

SEQ ID NO: 10020 - DNA, 29 bp, Homo sapiens
cgggtatagcagcagctggtaccaattac

SEQ ID NO: 10021 - DNA, 28 bp, Homo sapiens
tagtagatatagcagctcgtccggaggg

SEQ ID NO: 10022 - DNA, 34 bp, Homo sapiens
gggcctagggttggagtggaggttatcaccgggg

SEQ ID NO: 10023 - DNA, 17 bp, Homo sapiens
ttcggaaggctacgagt

SEQ ID NO: 10024 - DNA, 28 bp, Homo sapiens
tggggatagcagtggctggtacgccaga

SEQ ID NO: 10025 - DNA, 28 bp, Homo sapiens
cccggacggtcgggttcggggagtccgc

SEQ ID NO: 10026 - DNA, 16 bp, Homo sapiens
tagatggggttcttca

SEQ ID NO: 10027 - DNA, 26 bp, Homo sapiens
tgccgatagcagtggctggtacgccc

SEQ ID NO: 10028 - DNA, 27 bp, Homo sapiens
aatccggacgtatacgattttggctca

SEQ ID NO: 10029 - DNA, 33 bp, Homo sapiens; identical to SEQ ID NO: 7092

SEQ ID NO: 10030 - DNA, 18 bp, Homo sapiens
gcctccatagcagctctg

SEQ ID NO: 10031 - DNA, 12 bp, Homo sapiens
cccatatccgac

SEQ ID NO: 10032 - DNA, 34 bp, Homo sapiens
ctacacgccttacgctttggagtggttaccatta

SEQ ID NO: 10033 - DNA, 22 bp, Homo sapiens
tccctcttctccggcactgtgg

SEQ ID NO: 10034 - DNA, 16 bp, Homo sapiens
ccagtgagaaacggca

SEQ ID NO: 10035 - DNA, 14 bp, Homo sapiens
cctccaacctagac

SEQ ID NO: 10036 - DNA, 14 bp, Homo sapiens
aggtatgaaggcaa

SEQ ID NO: 10037 - DNA, 10 bp, Homo sapiens
tattttggtg

SEQ ID NO: 10038 - DNA, 28 bp, Homo sapiens
aatacggcccaatattgtaatattgtca

SEQ ID NO: 10039 - DNA, 11 bp, Homo sapiens
ggggttatcag

SEQ ID NO: 10040 - DNA, 17 bp, Homo sapiens
ctcgaggggtggaggac

SEQ ID NO: 10041 - DNA, 13 bp, Homo sapiens
tggccgggagagg

SEQ ID NO: 10042 - DNA, 11 bp, Homo sapiens
tcttcacgctc

SEQ ID NO: 10043 - DNA, 14 bp, Homo sapiens
ccaactctgatcgt

SEQ ID NO: 10044 - DNA, 10 bp, Homo sapiens
gggcctaggg

SEQ ID NO: 10045 - DNA, 12 bp, Homo sapiens
cccggacggtcg

SEQ ID NO: 10046 - DNA, 12 bp, Homo sapiens
aatccggacgta

SEQ ID NO: 10047 - DNA, 15 bp, Homo sapiens
ctacacgccttacgc

SEQ ID NO: 10048 - DNA, 13 bp, Homo sapiens
tttttggagtggt

SEQ ID NO: 10049 - DNA, 10 bp, Homo sapiens
cgctcgaggg

SEQ ID NO: 10050 - DNA, 10 bp, Homo sapiens
ctggcattac

SEQ ID NO: 10051 - DNA, 21 bp, Homo sapiens
atgataataatggtttttact

SEQ ID NO: 10052 - DNA, 16 bp, Homo sapiens
tagcacctagtgctat

SEQ ID NO: 10053 - DNA, 14 bp, Homo sapiens
gccgcaggtggtac

SEQ ID NO: 10054 - DNA, 15 bp, Homo sapiens
tatatgattggctgg

SEQ ID NO: 10055 - DNA, 14 bp, Homo sapiens
gtgattatcgaacc

SEQ ID NO: 10056 - DNA, 12 bp, Homo sapiens
atggtccgtgga

SEQ ID NO: 10057 - DNA, 11 bp, Homo sapiens
gcagcgcgtcc

SEQ ID NO: 10058 - DNA, 19 bp, Homo sapiens
gtatagcagcagctcttac

SEQ ID NO: 10059 - DNA, 13 bp, Homo sapiens
attgctatgggga

SEQ ID NO: 10060 - DNA, 21 bp, Homo sapiens
gacagtacaggttatcactac

SEQ ID NO: 10061 - DNA, 10 bp, Homo sapiens
cagtggctgg

SEQ ID NO: 10062 - DNA, 18 bp, Homo sapiens
tgatactactggctatta

SEQ ID NO: 10063 - DNA, 19 bp, Homo sapiens
tgtagtggtatcgactgct

SEQ ID NO: 10064 - DNA, 13 bp, Homo sapiens
ctacagagactac

SEQ ID NO: 10065 - DNA, 12 bp, Homo sapiens
cttcggtgacta

SEQ ID NO: 10066 - DNA, 15 bp, Homo sapiens
gtttaactttggttc

SEQ ID NO: 10067 - DNA, 12 bp, Homo sapiens
ggtgattatgcc

SEQ ID NO: 10068 - DNA, 15 bp, Homo sapiens
gggtcggggagttat

SEQ ID NO: 10069 - DNA, 24 bp, Homo sapiens
tattactatgatagtagtggttat

SEQ ID NO: 10070 - DNA, 21 bp, Homo sapiens
gggtatagcagcagctggtac

SEQ ID NO: 10071 - DNA, 15 bp, Homo sapiens
tatagcagctcgtcc

SEQ ID NO: 10072 - DNA, 16 bp, Homo sapiens
ttggagtggaggttat

SEQ ID NO: 10073 - DNA, 21 bp, Homo sapiens
ggggatagcagtggctggtac

SEQ ID NO: 10074 - DNA, 12 bp, Homo sapiens
ggttcggggagt

SEQ ID NO: 10075 - DNA, 17 bp, Homo sapiens
atagcagtggctggtac

SEQ ID NO: 10076 - DNA, 21 bp, Homo sapiens
acgatttttggagtggttatt

SEQ ID NO: 10077 - DNA, 10 bp, Homo sapiens
atagcagctc

SEQ ID NO: 10078 - DNA, 13 bp, Homo sapiens
tttggagtggtta

SEQ ID NO: 10079 - DNA, 12 bp, Homo sapiens
gcccaccggggc

SEQ ID NO: 10080 - DNA, 13 bp, Homo sapiens
attagatactatc

SEQ ID NO: 10081 - DNA, 17 bp, Homo sapiens
gatgacgatgggccccg

SEQ ID NO: 10082 - DNA, 31 bp, Homo sapiens
cagggtccgacgcgcgataagcgactaccaa

SEQ ID NO: 10083 - DNA, 27 bp, Homo sapiens
tactactaccacttcatggacgtctgg

SEQ ID NO: 10084 - DNA, 13 bp, Homo sapiens
tttgaatatctgg

SEQ ID NO: 10085 - DNA, 10 bp, Homo sapiens
attcactttc

SEQ ID NO: 10086 - DNA, 12 bp, Homo sapiens
tttgattattgg

SEQ ID NO: 10087 - DNA, 19 bp, Homo sapiens
tgatgcttttgatatctgg

SEQ ID NO: 10088 - DNA, 10 bp, Homo sapiens
gctcactttc

SEQ ID NO: 10089 - DNA, 16 bp, Homo sapiens
ctactttgactactgg

SEQ ID NO: 10090 - DNA, 10 bp, Homo sapiens
tgactactgg

SEQ ID NO: 10091 - DNA, 16 bp, Homo sapiens
ctggttcgacccctgg

SEQ ID NO: 10092 - DNA, 15 bp, Homo sapiens
gcttttaatatctgg

SEQ ID NO: 10093 - DNA, 20 bp, Homo sapiens
acttcttcatggacgtctgg

SEQ ID NO: 10094 - DNA, 12 bp, Homo sapiens
tttaactactgg

SEQ ID NO: 10095 - DNA, 10 bp, Homo sapiens
gctcactttc

SEQ ID NO: 10096 - DNA, 10 bp, Homo sapiens
tgaatactgg

SEQ ID NO: 10097 - DNA, 18 bp, Homo sapiens
tacggtttggacgtctgg

SEQ ID NO: 10098 - DNA, 16 bp, Homo sapiens
tggttttgatgtctgg

SEQ ID NO: 10099 - DNA, 15 bp, Homo sapiens
tactttgaccactgg

SEQ ID NO: 10100 - DNA, 12 bp, Homo sapiens
tttgactactgg

SEQ ID NO: 10101 - DNA, 22 bp, Homo sapiens
ctactacggtttggacgactgg

SEQ ID NO: 10102 - DNA, 10 bp, Homo sapiens
gatcacgttc

SEQ ID NO: 10103 - DNA, 18 bp, Homo sapiens
tacgccatggacgtctgg

SEQ ID NO: 10104 - DNA, 12 bp, Homo sapiens
tttgactactgg

SEQ ID NO: 10105 - DNA, 18 bp, Homo sapiens
tactatatggaagtctgg

SEQ ID NO: 10106 - DNA, 10 bp, Homo sapiens
tggcgactgg

SEQ ID NO: 10107 - DNA, 10 bp, Homo sapiens
tgaccactgg

SEQ ID NO: 10108 - DNA, 15 bp, Homo sapiens
gcttttgatatctgg

SEQ ID NO: 10109 - DNA, 25 bp, Homo sapiens
ctactactactacatggacgtctgg

SEQ ID NO: 10110 - DNA, 10 bp, Homo sapiens
gtggacgttc

SEQ ID NO: 10111 - DNA, 15 bp, Homo sapiens
tactttgactactgg

SEQ ID NO: 10112 - DNA, 17 bp, Homo sapiens
actactttgactactgg

SEQ ID NO: 10113 - DNA, 10 bp, Homo sapiens
gctcactttc

SEQ ID NO: 10114 - DNA, 12 bp, Homo sapiens
tttgactactgg

SEQ ID NO: 10115 - DNA, 10 bp, Homo sapiens
gtggacgttc

SEQ ID NO: 10116 - DNA, 19 bp, Homo sapiens
ctactacatggacgtctgg

SEQ ID NO: 10117 - DNA, 10 bp, Homo sapiens
gtgcagtttt

SEQ ID NO: 10118 - DNA, 24 bp, Homo sapiens
tactactactacatggacgtctgg

SEQ ID NO: 10119 - DNA, 10 bp, Homo sapiens
gtggacgttc

SEQ ID NO: 10120 - DNA, 14 bp, Homo sapiens
actttgactactgg

SEQ ID NO: 10121 - DNA, 10 bp, Homo sapiens
gtggacgttc

SEQ ID NO: 10122 - DNA, 18 bp, Homo sapiens
aactggttcgacccctgg

SEQ ID NO: 10123 - DNA, 17 bp, Homo sapiens
actactttgactactgg

SEQ ID NO: 10124 - DNA, 26 bp, Homo sapiens
actactactacggtatggacgtctgg

SEQ ID NO: 10125 - DNA, 13 bp, Homo sapiens
ctttggctactgg

SEQ ID NO: 10126 - DNA, 10 bp, Homo sapiens
gtggacgttc

SEQ ID NO: 10127 - DNA, 12 bp, Homo sapiens
tttgactactgg

SEQ ID NO: 10128 - DNA, 10 bp, Homo sapiens
gctcactttc

SEQ ID NO: 10129 - DNA, 10 bp, Homo sapiens
gctcactttc

SEQ ID NO: 10130 - DNA, 51 bp, Homo sapiens; identical to SEQ ID NO: 7644

SEQ ID NO: 10131 - DNA, 78 bp, Homo sapiens
tttttggagtggtcccgcccttactactaccacttcatggacgtctggggcaaagggaccacggtcaccgtctcctca

SEQ ID NO: 10132 - DNA, 56 bp, Homo sapiens
cgctcgagggcgtttgaatatctggggcctagggacaatggtcaccgtctcttcag

SEQ ID NO: 10133 - DNA, 57 bp, Homo sapiens
ctggcattactcgttttgattattggggccagggagccctggtcaccgtctcctcag

SEQ ID NO: 10134 - DNA, 72 bp, Homo sapiens
atgataataatggtttttactttgatgcttttgatatctggggccaagggacaatggtcaccgtctcttcag

SEQ ID NO: 10135 - DNA, 56 bp, Homo sapiens
ctcctcggcctactttgactactggggccagggagtcctggtcaccgtctcctcag

SEQ ID NO: 10136 - DNA, 56 bp, Homo sapiens
tgcctacagcgttcctgactactggggccagggaaccctggtcaccgtctcctcag

SEQ ID NO: 10137 - DNA, 57 bp, Homo sapiens
tagcacctagtgctatcgaatactggggccagggaaccctggtcaccgtctcctcag

SEQ ID NO: 10138 - DNA, 67 bp, Homo sapiens
gccgcaggtggtacgttgggctggttcgacccctggggccagggaaccctggtcaccgtctcctcag

SEQ ID NO: 10139 - DNA, 73 bp, Homo sapiens
tatatgattggctgggcccaccggggcgcttttaatatctggggccaagggacaatggtcaccgtctcttcag

SEQ ID NO: 10140 - DNA, 77 bp, Homo sapiens; identical to SEQ ID NO: 47

SEQ ID NO: 10141 - DNA, 59 bp, Homo sapiens
atggtccgtggatcgatttaactactggggccagggaactctggtcaccgtctcctcag

SEQ ID NO: 10142 - DNA, 51 bp, Homo sapiens
actggcaccctgaatactggggccagggaaccctggtcaccgtctcctcag

SEQ ID NO: 10143 - DNA, 62 bp, Homo sapiens
gcagcgcgtccaattacggtttggacgtctggggccaagggaccacggtcaccgtctcctca

SEQ ID NO: 10144 - DNA, 68 bp, Homo sapiens
gtatagcagcagctcttacagtggttttgatgtctggggccaagggacaatggtcaccgtctcttcag

SEQ ID NO: 10145 - DNA, 50 bp, Homo sapiens
gtattactttgaccactggggccagggaatcctggtcaccgtctcctcag

SEQ ID NO: 10146 - DNA, 57 bp, Homo sapiens
attgctatggggaatttgactactggggccagggaaccctggtcaccgtctcctcag

SEQ ID NO: 10147 - DNA, 90 bp, Homo sapiens
gacagtacaggttatcactacgatgacgatgggccccgctactacggtttggacgactggggccaggggaccacggtcaccgtctcctca

SEQ ID NO: 10148 - DNA, 89 bp, Homo sapiens
cagtggctggcagggtccgacgcgcgataagcgactaccaatacgccatggacgtctggggccaagggaccacggtcaccgtctcctca

SEQ ID NO: 10149 - DNA, 68 bp, Homo sapiens
tgatactactggctattatgatccttttgactactggggccagggaaccctggtcaccgtctcctcag

SEQ ID NO: 10150 - DNA, 72 bp, Homo sapiens
tgtagtggtatcgactgctctttatactatatggaagtctggggcaaagggaccacggtcaccgtctcctca

SEQ ID NO: 10151 - DNA, 56 bp, Homo sapiens
ctacagagactacacggacttctggggccagggaaccctggtcaccgtctcctcag

SEQ ID NO: 10152 - DNA, 53 bp, Homo sapiens
cttcggtgactatggcgactggggccagggaaccctggtcaccgtctcctcag

SEQ ID NO: 10153 - DNA, 62 bp, Homo sapiens
gtttaactttggttcccgagatgaccactggggccagggaaccctggtcaccgtctcctcag

SEQ ID NO: 10154 - DNA, 55 bp, Homo sapiens
ggtgattatgcccccggacgtctggggccaagggaccacggtcaccgtctcctca

SEQ ID NO: 10155 - DNA, 52 bp, Homo sapiens
gggtcggggagttatgggtggggccagggaaccctggtcaccgtctcctcag

SEQ ID NO: 10156 - DNA, 64 bp, Homo sapiens
tattactatgatagtagtggttatagctactggggccagggaaccctggtcaccgtctcctcag

SEQ ID NO: 10157 - DNA, 74 bp, Homo sapiens
gggtatagcagcagctggtaccaattacgcttttgatatctggggccaagggacaatggtcaccgtctcttcag

SEQ ID NO: 10158 - DNA, 76 bp, Homo sapiens
tatagcagctcgtccggagggctactactactacatggacgtctggggcaaagggaccacggtcaccgtctcctca

SEQ ID NO: 10159 - DNA, 70 bp, Homo sapiens
ttggagtggaggttatcaccggggtactttgactactggggccagggaaccctggtcaccgtctcctcag

SEQ ID NO: 10160 - DNA, 58 bp, Homo sapiens; identical to SEQ ID NO: 7832

SEQ ID NO: 10161 - DNA, 70 bp, Homo sapiens; identical to SEQ ID NO: 7804

SEQ ID NO: 10162 - DNA, 65 bp, Homo sapiens
ggttcggggagtccgcctactacatggacgtctggggcaaagggaccacggtcaccgtctcctca

SEQ ID NO: 10163 - DNA, 65 bp, Homo sapiens
ggggttcttcatactactactacatggacgtctggggcaaagggaccacggtcaccgtctcctca

SEQ ID NO: 10164 - DNA, 66 bp, Homo sapiens
atagcagtggctggtacgcccactttgactactggggccagggaaccctggtcaccgtctcctcag

SEQ ID NO: 10165 - DNA, 64 bp, Homo sapiens
tacgattttggctcaaactggttcgacccctggggccagggaaccctggtcaccgtctcctcag

SEQ ID NO: 10166 - DNA, 75 bp, Homo sapiens; identical to SEQ ID NO: 7771

SEQ ID NO: 10167 - DNA, 68 bp, Homo sapiens
atagcagctctgactactactacggtatggacgtctggggccaagggaccacggtcaccgtctcctca

SEQ ID NO: 10168 - DNA, 53 bp, Homo sapiens
atatccgacctttggctactggggccagggaaccctggtcaccgtctcctcag

SEQ ID NO: 10169 - DNA, 62 bp, Homo sapiens
tttggagtggttaccattatttgactactggggccagggaaccctggtcaccgtctcctcag

SEQ ID NO: 10170 - DNA, 40 bp, Homo sapiens; identical to SEQ ID NO: 7849

SEQ ID NO: 10171 - DNA, 34 bp, Homo sapiens; identical to SEQ ID NO: 2252

SEQ ID NO: 10172 - DNA, 57 bp, Homo sapiens
tactactaccacttcatggacgtctggggcaaagggaccacggtcaccgtctcctca

SEQ ID NO: 10173 - DNA, 35 bp, Homo sapiens; identical to SEQ ID NO: 2307

SEQ ID NO: 10174 - DNA, 44 bp, Homo sapiens
tttgaatatctggggcctagggacaatggtcaccgtctcttcag

SEQ ID NO: 10175 - DNA, 38 bp, Homo sapiens; identical to SEQ ID NO: 2309

SEQ ID NO: 10176 - DNA, 43 bp, Homo sapiens
tttgattattggggccagggagccctggtcaccgtctcctcag

SEQ ID NO: 10177 - DNA, 33 bp, Homo sapiens
ccttcggccaagggacacgactggagattaaac

SEQ ID NO: 10178 - DNA, 50 bp, Homo sapiens; identical to SEQ ID NO: 7856

SEQ ID NO: 10179 - DNA, 38 bp, Homo sapiens; identical to SEQ ID NO: 2246

SEQ ID NO: 10180 - DNA, 47 bp, Homo sapiens
ctactttgactactggggccagggagtcctggtcaccgtctcctcag

SEQ ID NO: 10181 - DNA, 35 bp, Homo sapiens; identical to SEQ ID NO: 2307

SEQ ID NO: 10182 - DNA, 41 bp, Homo sapiens; identical to SEQ ID NO: 2251

SEQ ID NO: 10183 - DNA, 35 bp, Homo sapiens; identical to SEQ ID NO: 2307

SEQ ID NO: 10184 - DNA, 40 bp, Homo sapiens
gaatactggggccagggaaccctggtcaccgtctcctcag

SEQ ID NO: 10185 - DNA, 36 bp, Homo sapiens; identical to SEQ ID NO: 2264

SEQ ID NO: 10186 - DNA, 47 bp, Homo sapiens; identical to SEQ ID NO: 8015

SEQ ID NO: 10187 - DNA, 34 bp, Homo sapiens; identical to SEQ ID NO: 2252

SEQ ID NO: 10188 - DNA, 46 bp, Homo sapiens
gcttttaatatctggggccaagggacaatggtcaccgtctcttcag

SEQ ID NO: 10189 - DNA, 37 bp, Homo sapiens
ttcactttcggccctgggaccaaagtggatatcaaac

SEQ ID NO: 10190 - DNA, 50 bp, Homo sapiens; identical to SEQ ID NO: 48

SEQ ID NO: 10191 - DNA, 34 bp, Homo sapiens; identical to SEQ ID NO: 2252

SEQ ID NO: 10192 - DNA, 43 bp, Homo sapiens
tttaactactggggccagggaactctggtcaccgtctcctcag

SEQ ID NO: 10193 - DNA, 38 bp, Homo sapiens; identical to SEQ ID NO: 2246

SEQ ID NO: 10194 - DNA, 41 bp, Homo sapiens
tgaatactggggccagggaaccctggtcaccgtctcctcag

SEQ ID NO: 10195 - DNA, 36 bp, Homo sapiens
acacttttggccaggggaccaaggtggagatcaaac

SEQ ID NO: 10196 - DNA, 48 bp, Homo sapiens
tacggtttggacgtctggggccaagggaccacggtcaccgtctcctca

SEQ ID NO: 10197 - DNA, 34 bp, Homo sapiens; identical to SEQ ID NO: 2266

SEQ ID NO: 10198 - DNA, 47 bp, Homo sapiens
tggttttgatgtctggggccaagggacaatggtcaccgtctcttcag

SEQ ID NO: 10199 - DNA, 37 bp, Homo sapiens
ctcactttcggcggggggaccaaggtggagatcaaac

SEQ ID NO: 10200 - DNA, 46 bp, Homo sapiens
tactttgaccactggggccagggaatcctggtcaccgtctcctcag

SEQ ID NO: 10201 - DNA, 36 bp, Homo sapiens; identical to SEQ ID NO: 2274

SEQ ID NO: 10202 - DNA, 43 bp, Homo sapiens; identical to SEQ ID NO: 7890

SEQ ID NO: 10203 - DNA, 35 bp, Homo sapiens
caccttcggcggagggaccaaggtggaaatcaaac

SEQ ID NO: 10204 - DNA, 52 bp, Homo sapiens
ctactacggtttggacgactggggccaggggaccacggtcaccgtctcctca

SEQ ID NO: 10205 - DNA, 38 bp, Homo sapiens
gatcacgttcggccgagggacacgactggagattaaac

SEQ ID NO: 10206 - DNA, 48 bp, Homo sapiens
tacgccatggacgtctggggccaagggaccacggtcaccgtctcctca

SEQ ID NO: 10207 - DNA, 37 bp, Homo sapiens
tataattttggtcaggggaccaaggtggagatcaaac

SEQ ID NO: 10208 - DNA, 43 bp, Homo sapiens; identical to SEQ ID NO: 7890

SEQ ID NO: 10209 - DNA, 36 bp, Homo sapiens
acagttttggccaggggaccaaggtggagatcaaac

SEQ ID NO: 10210 - DNA, 48 bp, Homo sapiens
tactatatggaagtctggggcaaagggaccacggtcaccgtctcctca

SEQ ID NO: 10211 - DNA, 36 bp, Homo sapiens; identical to SEQ ID NO: 2274

SEQ ID NO: 10212 - DNA, 40 bp, Homo sapiens
gacttctggggccagggaaccctggtcaccgtctcctcag

SEQ ID NO: 10213 - DNA, 34 bp, Homo sapiens; identical to SEQ ID NO: 2275

SEQ ID NO: 10214 - DNA, 41 bp, Homo sapiens
tggcgactggggccagggaaccctggtcaccgtctcctcag

SEQ ID NO: 10215 - DNA, 36 bp, Homo sapiens; identical to SEQ ID NO: 2274

SEQ ID NO: 10216 - DNA, 41 bp, Homo sapiens
tgaccactggggccagggaaccctggtcaccgtctcctcag

SEQ ID NO: 10217 - DNA, 34 bp, Homo sapiens; identical to SEQ ID NO: 2252

SEQ ID NO: 10218 - DNA, 39 bp, Homo sapiens; identical to SEQ ID NO: 8019

SEQ ID NO: 10219 - DNA, 37 bp, Homo sapiens
ttcaatttcggccctgggaccaaagtggatatcaaac

SEQ ID NO: 10220 - DNA, 34 bp, Homo sapiens; identical to SEQ ID NO: 2342

SEQ ID NO: 10221 - DNA, 35 bp, Homo sapiens; identical to SEQ ID NO: 2256

SEQ ID NO: 10222 - DNA, 38 bp, Homo sapiens
ctactggggccagggaaccctggtcaccgtctcctcag

SEQ ID NO: 10223 - DNA, 37 bp, Homo sapiens; identical to SEQ ID NO: 2325

SEQ ID NO: 10224 - DNA, 46 bp, Homo sapiens; identical to SEQ ID NO: 8003

SEQ ID NO: 10225 - DNA, 36 bp, Homo sapiens
tcaccttcggccaagggacacgactggagattaaac

SEQ ID NO: 10226 - DNA, 55 bp, Homo sapiens
ctactactactacatggacgtctggggcaaagggaccacggtcaccgtctcctca

SEQ ID NO: 10227 - DNA, 38 bp, Homo sapiens; identical to SEQ ID NO: 2291

SEQ ID NO: 10228 - DNA, 46 bp, Homo sapiens; identical to SEQ ID NO: 2326

SEQ ID NO: 10229 - DNA, 34 bp, Homo sapiens
actttcggccctgggaccaaagtggatatcaaac

SEQ ID NO: 10230 - DNA, 48 bp, Homo sapiens; identical to SEQ ID NO: 2310

SEQ ID NO: 10231 - DNA, 38 bp, Homo sapiens; identical to SEQ ID NO: 2246

SEQ ID NO: 10232 - DNA, 43 bp, Homo sapiens; identical to SEQ ID NO: 7890

SEQ ID NO: 10233 - DNA, 38 bp, Homo sapiens; identical to SEQ ID NO: 2291

SEQ ID NO: 10234 - DNA, 49 bp, Homo sapiens
ctactacatggacgtctggggcaaagggaccacggtcaccgtctcctca

SEQ ID NO: 10235 - DNA, 38 bp, Homo sapiens
gtgcagttttggccaggggaccaaggtggagatcaaac

SEQ ID NO: 10236 - DNA, 54 bp, Homo sapiens
tactactactacatggacgtctggggcaaagggaccacggtcaccgtctcctca

SEQ ID NO: 10237 - DNA, 38 bp, Homo sapiens; identical to SEQ ID NO: 2291

SEQ ID NO: 10238 - DNA, 45 bp, Homo sapiens; identical to SEQ ID NO: 2288

SEQ ID NO: 10239 - DNA, 38 bp, Homo sapiens; identical to SEQ ID NO: 2291

SEQ ID NO: 10240 - DNA, 49 bp, Homo sapiens
aactggttcgacccctggggccagggaaccctggtcaccgtctcctcag

SEQ ID NO: 10241 - DNA, 48 bp, Homo sapiens; identical to SEQ ID NO: 2310

SEQ ID NO: 10242 - DNA, 56 bp, Homo sapiens; identical to SEQ ID NO: 7972

SEQ ID NO: 10243 - DNA, 36 bp, Homo sapiens; identical to SEQ ID NO: 10225

SEQ ID NO: 10244 - DNA, 44 bp, Homo sapiens
ctttggctactggggccagggaaccctggtcaccgtctcctcag

SEQ ID NO: 10245 - DNA, 38 bp, Homo sapiens; identical to SEQ ID NO: 2291

SEQ ID NO: 10246 - DNA, 43 bp, Homo sapiens; identical to SEQ ID NO: 7890

SEQ ID NO: 10247 - DNA, 38 bp, Homo sapiens; identical to SEQ ID NO: 2246

SEQ ID NO: 10248 - DNA, 38 bp, Homo sapiens; identical to SEQ ID NO: 2246

SEQ ID NO: 10249 - DNA, 36 bp, Homo sapiens; identical to SEQ ID NO: 2262

SEQ ID NO: 10250 - DNA, 34 bp, Homo sapiens; identical to SEQ ID NO: 8054

SEQ ID NO: 10251 - DNA, 31 bp, Homo sapiens; identical to SEQ ID NO: 2343

SEQ ID NO: 10252 - DNA, 33 bp, Homo sapiens; identical to SEQ ID NO: 49

SEQ ID NO: 10253 - DNA, 31 bp, Homo sapiens; identical to SEQ ID NO: 2343

SEQ ID NO: 10254 - DNA, 34 bp, Homo sapiens
tggggcctagggacaatggtcaccgtctcttcag

SEQ ID NO: 10255 - DNA, 31 bp, Homo sapiens; identical to SEQ ID NO: 2355

SEQ ID NO: 10256 - DNA, 34 bp, Homo sapiens; identical to SEQ ID NO: 2352

SEQ ID NO: 10257 - DNA, 31 bp, Homo sapiens; identical to SEQ ID NO: 2380

SEQ ID NO: 10258 - DNA, 34 bp, Homo sapiens; identical to SEQ ID NO: 2367

SEQ ID NO: 10259 - DNA, 31 bp, Homo sapiens; identical to SEQ ID NO: 2337

SEQ ID NO: 10260 - DNA, 34 bp, Homo sapiens
tggggccagggagtcctggtcaccgtctcctcag

SEQ ID NO: 10261 - DNA, 31 bp, Homo sapiens; identical to SEQ ID NO: 2343

SEQ ID NO: 10262 - DNA, 34 bp, Homo sapiens; identical to SEQ ID NO: 2342

SEQ ID NO: 10263 - DNA, 31 bp, Homo sapiens; identical to SEQ ID NO: 2343

SEQ ID NO: 10264 - DNA, 34 bp, Homo sapiens; identical to SEQ ID NO: 2342

SEQ ID NO: 10265 - DNA, 31 bp, Homo sapiens; identical to SEQ ID NO: 2355

SEQ ID NO: 10266 - DNA, 34 bp, Homo sapiens; identical to SEQ ID NO: 2342

SEQ ID NO: 10267 - DNA, 31 bp, Homo sapiens; identical to SEQ ID NO: 2343

SEQ ID NO: 10268 - DNA, 34 bp, Homo sapiens; identical to SEQ ID NO: 2367

SEQ ID NO: 10269 - DNA, 31 bp, Homo sapiens; identical to SEQ ID NO: 2355

SEQ ID NO: 10270 - DNA, 33 bp, Homo sapiens; identical to SEQ ID NO: 49

SEQ ID NO: 10271 - DNA, 31 bp, Homo sapiens; identical to SEQ ID NO: 2343

SEQ ID NO: 10272 - DNA, 34 bp, Homo sapiens
tggggccagggaactctggtcaccgtctcctcag

SEQ ID NO: 10273 - DNA, 31 bp, Homo sapiens; identical to SEQ ID NO: 2337

SEQ ID NO: 10274 - DNA, 34 bp, Homo sapiens; identical to SEQ ID NO: 2342

SEQ ID NO: 10275 - DNA, 31 bp, Homo sapiens; identical to SEQ ID NO: 2339

SEQ ID NO: 10276 - DNA, 33 bp, Homo sapiens; identical to SEQ ID NO: 2371

SEQ ID NO: 10277 - DNA, 31 bp, Homo sapiens; identical to SEQ ID NO: 2357

SEQ ID NO: 10278 - DNA, 34 bp, Homo sapiens; identical to SEQ ID NO: 2367

SEQ ID NO: 10279 - DNA, 31 bp, Homo sapiens
ttcggcggggggaccaaggtggagatcaaac

SEQ ID NO: 10280 - DNA, 34 bp, Homo sapiens
tggggccagggaatcctggtcaccgtctcctcag

SEQ ID NO: 10281 - DNA, 31 bp, Homo sapiens; identical to SEQ ID NO: 2357

SEQ ID NO: 10282 - DNA, 34 bp, Homo sapiens; identical to SEQ ID NO: 2342

SEQ ID NO: 10283 - DNA, 31 bp, Homo sapiens; identical to SEQ ID NO: 2357

SEQ ID NO: 10284 - DNA, 33 bp, Homo sapiens; identical to SEQ ID NO: 2407

SEQ ID NO: 10285 - DNA, 31 bp, Homo sapiens
ttcggccgagggacacgactggagattaaac

SEQ ID NO: 10286 - DNA, 33 bp, Homo sapiens; identical to SEQ ID NO: 2371

SEQ ID NO: 10287 - DNA, 31 bp, Homo sapiens
tttggtcaggggaccaaggtggagatcaaac

SEQ ID NO: 10288 - DNA, 34 bp, Homo sapiens; identical to SEQ ID NO: 2342

SEQ ID NO: 10289 - DNA, 31 bp, Homo sapiens; identical to SEQ ID NO: 2339

SEQ ID NO: 10290 - DNA, 33 bp, Homo sapiens; identical to SEQ ID NO: 49

SEQ ID NO: 10291 - DNA, 31 bp, Homo sapiens; identical to SEQ ID NO: 2357

SEQ ID NO: 10292 - DNA, 34 bp, Homo sapiens; identical to SEQ ID NO: 2342

SEQ ID NO: 10293 - DNA, 31 bp, Homo sapiens; identical to SEQ ID NO: 2347

SEQ ID NO: 10294 - DNA, 34 bp, Homo sapiens; identical to SEQ ID NO: 2342

SEQ ID NO: 10295 - DNA, 31 bp, Homo sapiens; identical to SEQ ID NO: 2357

SEQ ID NO: 10296 - DNA, 34 bp, Homo sapiens; identical to SEQ ID NO: 2342

SEQ ID NO: 10297 - DNA, 31 bp, Homo sapiens; identical to SEQ ID NO: 2343

SEQ ID NO: 10298 - DNA, 33 bp, Homo sapiens; identical to SEQ ID NO: 2371

SEQ ID NO: 10299 - DNA, 31 bp, Homo sapiens; identical to SEQ ID NO: 2355

SEQ ID NO: 10300 - DNA, 34 bp, Homo sapiens; identical to SEQ ID NO: 2342

SEQ ID NO: 10301 - DNA, 31 bp, Homo sapiens; identical to SEQ ID NO: 2347

SEQ ID NO: 10302 - DNA, 34 bp, Homo sapiens; identical to SEQ ID NO: 2342

SEQ ID NO: 10303 - DNA, 31 bp, Homo sapiens; identical to SEQ ID NO: 2380

SEQ ID NO: 10304 - DNA, 34 bp, Homo sapiens; identical to SEQ ID NO: 2367

SEQ ID NO: 10305 - DNA, 31 bp, Homo sapiens; identical to SEQ ID NO: 2380

SEQ ID NO: 10306 - DNA, 33 bp, Homo sapiens; identical to SEQ ID NO: 49

SEQ ID NO: 10307 - DNA, 31 bp, Homo sapiens; identical to SEQ ID NO: 2343

SEQ ID NO: 10308 - DNA, 34 bp, Homo sapiens; identical to SEQ ID NO: 2342

SEQ ID NO: 10309 - DNA, 31 bp, Homo sapiens; identical to SEQ ID NO: 2355

SEQ ID NO: 10310 - DNA, 34 bp, Homo sapiens; identical to SEQ ID NO: 2342

SEQ ID NO: 10311 - DNA, 31 bp, Homo sapiens; identical to SEQ ID NO: 2337

SEQ ID NO: 10312 - DNA, 34 bp, Homo sapiens; identical to SEQ ID NO: 2342

SEQ ID NO: 10313 - DNA, 31 bp, Homo sapiens; identical to SEQ ID NO: 2343

SEQ ID NO: 10314 - DNA, 33 bp, Homo sapiens; identical to SEQ ID NO: 49

SEQ ID NO: 10315 - DNA, 31 bp, Homo sapiens; identical to SEQ ID NO: 2339

SEQ ID NO: 10316 - DNA, 33 bp, Homo sapiens; identical to SEQ ID NO: 49

SEQ ID NO: 10317 - DNA, 31 bp, Homo sapiens; identical to SEQ ID NO: 2343

SEQ ID NO: 10318 - DNA, 34 bp, Homo sapiens; identical to SEQ ID NO: 2342

SEQ ID NO: 10319 - DNA, 31 bp, Homo sapiens; identical to SEQ ID NO: 2343

SEQ ID NO: 10320 - DNA, 34 bp, Homo sapiens; identical to SEQ ID NO: 2342

SEQ ID NO: 10321 - DNA, 34 bp, Homo sapiens; identical to SEQ ID NO: 2342

SEQ ID NO: 10322 - DNA, 33 bp, Homo sapiens; identical to SEQ ID NO: 2371

SEQ ID NO: 10323 - DNA, 31 bp, Homo sapiens; identical to SEQ ID NO: 2380

SEQ ID NO: 10324 - DNA, 34 bp, Homo sapiens; identical to SEQ ID NO: 2342

SEQ ID NO: 10325 - DNA, 31 bp, Homo sapiens; identical to SEQ ID NO: 2343

SEQ ID NO: 10326 - DNA, 34 bp, Homo sapiens; identical to SEQ ID NO: 2342

SEQ ID NO: 10327 - DNA, 31 bp, Homo sapiens; identical to SEQ ID NO: 2337

SEQ ID NO: 10328 - DNA, 31 bp, Homo sapiens; identical to SEQ ID NO: 2337

SEQ ID NO: 10329 - DNA, 31 bp, Homo sapiens; identical to SEQ ID NO: 2343
